(19) United States
(12) Patent Application Publication
(10) Pub. No.: US 2010/0189706 A1
(43) Pub. Date: Jul. 29, 2010

(54) ENZYMES FOR THE TREATMENT OF LIGNOCELLULOSICS, NUCLEIC ACIDS ENCODING THEM AND METHODS FOR MAKING AND USING THEM

(76) Inventors: Cathy Chang, San Marcos, CA (US); Justin T. Stege, San Diego, CA (US); Nahla Aboushadi, Katy, TX (US); Gordana Djordjevic, La Jolla, CA (US); Ellen Burke, San Diego, CA (US); Peter Luginbuhl, San Diego, CA (US); Mark Dycaico, San Diego, CA (US); Toby Richardson, San Diego, CA (US); John Poland, San Diego, CA (US); Ying Hefner, Encinitas, CA (US); Stacy Marie Miles, Chapel Hill, NC (US)

Correspondence Address: VERENIUM CORPORATION;Intellectual Property Department, P.O. Box 910550, SAN DIEGO, CA, 92191-0550, US

(21) Appl. No.: 12/525,303

(22) PCT Filed: Jan. 30, 2008
(86) PCT No.: PCT/US08/52517

§ 371 Date: Feb. 2, 2010

Related U.S. Application Data
(60) Provisional application No. 60/887,329, filed on Jan. 30, 2007.

(51) Int. Cl. A61K 38/44; A61K 38/46; C12N 11/16; A23L 1/28; C12P 21/06; C12P 19/34; C12P 7/04; C12P 7/16; C12P 7/06; C12N 11/14; C12N 11/00; C12N 11/08; C12N 9/00; C12N 9/02; C12N 9/10; C12N 9/42; C12N 5/10; C12N 1/21; C12N 1/15; C12N 1/19; C12N 15/63; C12P 1/00; D21C 3/00; C40B 40/06; C40B 40/10; C11D 7/42; C07K 16/00; C07H 21/04; A01K 67/00; A01H 5/00

(52) U.S. Cl. 424/94.4; 424/94.5; 424/94.6; 426/7; 426/61; 435/69.1; 435/91.2; 435/157; 435/160; 435/161; 435/176; 435/177; 435/180; 435/183; 435/189; 435/193; 435/209; 435/325; 435/348; 435/411; 435/412; 435/414; 435/415; 435/417; 435/419; 435/252.3; 435/254.11; 435/254.2; 435/320.1; 435/267; 435/278; 506/16; 506/18; 510/392; 530/387.9; 536/23.2; 536/24.3; 800/13; 800/298

(57) ABSTRACT

The invention provides polypeptides having a lignocellulolytic activity, e.g., a glycosyl hydrolase, a cellulase, an endoglucanase, a cellobiohydrolase, a beta-glucosidase, a xylanase, a mannanse, a xylosidase (e.g., a β-xylosidase), an arabinofuranosidase, and/or a glucose oxidase activity, polynucleotides encoding these polypeptides, and methods of making and using these polynucleotides and polypeptides. In one aspect, the invention provides polypeptides that can enzymatically process (hydrolyze) sugarcane bagasse, i.e., for sugarcane bagasse degradation, or for biomass processing, and polynucleotides encoding these enzymes, and making and using these polynucleotides and polypeptides. In one embodiment, the invention provides thermostable and thermotolerant forms of polypeptides of the invention. The polypeptides of the invention can be used in a variety of pharmaceutical, agricultural and industrial contexts; for example, the invention provides a multi-enzyme system that can hydrolyze polysaccharides in a bagasse component of sugarcane processed in sugar mills. The invention provides enzymes for the bioconversion of lignocellulosic residues into fermentable sugars; and these sugars can be used as a chemical feedstock for the production of ethanol and fuels, including biofuels such as bioethanol, biopropanol, biobutanol and biodiesels.

### REFERENCE TO SEQUENCE LISTING SUBMITTED VIA EFS-WEB

[0001] This application was filed electronically via the USPTO EFS-WEB server, as authorized and set forth in MPEP §1730 II.B.2.(a)(A), and this electronic filing includes an electronically submitted sequence (SEQ ID) listing; the entire content of this sequence listing is herein expressly incorporated by reference for all purposes. The sequence listing is identified on the electronically filed .txt file as follows:

| File Name | Date of Creation | Size (bytes) |
|---|---|---|
| 564462015440Seqlist.txt | January 28, 2008 | 2,530,632 bytes |

### FIELD OF THE INVENTION

[0002] This invention relates to molecular and cellular biology and biochemistry. In one aspect, the invention provides polypeptides having a lignocellulolytic (lignocellulosic) activity, e.g., a ligninolytic and cellulolytic activity, including, e.g., a glycosyl hydrolase, a cellulase, an endoglucanase, a cellobiohydrolase, a beta-glucosidase, a xylanase, a mannanse, a xylosidase (e.g., a β-xylosidase) and/or an arabinofuranosidase activity, polynucleotides encoding these polypeptides, and methods of making and using these polynucleotides and polypeptides. In one embodiment, the invention provides thermostable and thermotolerant forms of polypeptides of the invention. The polypeptides and nucleic acids of the invention are used in a variety of pharmaceutical, agricultural and industrial contexts; for example, as enzymes for the bioconversion of a biomass, e.g., lignocellulosic residues, into fermentable sugars, where in one aspect these sugars are used as a chemical feedstock for the production of ethanol and fuels, e.g., biofuels, e.g., synthetic liquid or gas fuels, including ethanol, methanol and the like.

### BACKGROUND

[0003] There is a great interest in the bioconversion of biomass, such as material comprising lignocellulosic residues, into fermentable sugars. These sugars can be used in turn as chemical feedstock for the production of a biofuel, which is a clean-burning renewable energy source. Accordingly, there is a need in the industry for non-chemical means for processing biomass to make clean-burning renewable fuels.

### SUMMARY

[0004] The invention provides polypeptides having lignocellulolytic (lignocellulosic) activity, e.g., a ligninolytic and cellulolytic activity, including, e.g., having cellulase, endoglucanase, cellobiohydrolase, β-glucosidase(beta-glucosidase), xylanase, xylosidase (e.g., β-xylosidase), and/or an arabinofuranosidase activity, and nucleic acids encoding them, and methods for making and using them. The invention provides enzymes for the bioconversion of any biomass, e.g., a lignocellulosic residue, into fermentable sugars or polysaccharides; and these sugars or polysaccharides can be used as a chemical feedstock for the production of alcohols such as ethanol, propanol, butanol and/or methanol, and in the production of fuels, e.g., biofuels such as synthetic liquids or gases, such as syngas.

[0005] In one aspect, the enzymes of the invention have an increased catalytic rate to improve the process of substrate (e.g., a lignocellulosic residue, cellulose, bagasse) hydrolysis. This increased efficiency in catalytic rate leads to an increased efficiency in producing sugars or polysaccharides, which can be useful in industrial, agricultural or medical applications, e.g., to make a biofuel or an alcohol such as ethanol, propanol, butanol and/or methanol. In one aspect, sugars produced by hydrolysis using enzymes of this invention can be used by microorganisms for alcohol (e.g., ethanol, propanol, butanol and/or methanol) production and/or fuel (e.g., biofuel) production.

[0006] In one aspect, the invention provides highly active polypeptides having lignocellulosic activity, e.g., polypeptides having an increased catalytic rate that include glycosyl hydrolases, endoglucanases, cellobiohydrolases, β-glucosidases(beta-glucosidases), xylanases, xylosidase (e.g., β-xylosidase) and/or arabinofuranosidases.

[0007] The invention provides industrial, agricultural or medical applications: e.g., biomass to biofuel, e.g., ethanol, propanol, butanol and/or methanol, using enzymes of the invention having decreased enzyme costs, e.g., decreased costs in biomass to biofuel conversion processes. Thus, the invention provides efficient processes for producing bioalcohols, biofuels and/or biofuel- (e.g., bioethanol-, propanol-, butanol- and/or methanol-) comprising compositions, including synthetic, liquid or gas fuels comprising a bioalcohol, from any biomass.

[0008] In one aspect, enzymes of the invention, including the enzyme “cocktails” of the invention (“cocktails” meaning mixtures of enzymes comprising at least one enzyme of this invention), are used to hydrolyze the major components of a lignocellulosic biomass, or any composition comprising cellulose and/or hemicellulose (lignocellulosic biomass also comprises lignin), e.g., seeds, grains, tubers, plant waste (such as a hay or straw, e.g., a rice straw or a wheat straw, or any the dry stalk of any cereal plant) or byproducts of food processing or industrial processing (e.g., stalks), corn (including cobs, stover, and the like), grasses (e.g., Indian grass, such as Sorghastrum nutans; or, switch grass, e.g., Panicum species, such as Panicum virgatum), wood (including wood chips, processing waste, such as wood waste), paper, pulp, recycled paper (e.g., newspaper); also including a monocot or a dicot, or a monocot corn, sugarcane or parts thereof (e.g., cane tops), rice, wheat, barley, switchgrass or Miscanthus; or a dicot oilseed crop, soy, canola, rapeseed, flax, cotton, palm oil, sugar beet, peanut, tree, poplar or lupine.

[0009] In one aspect, enzymes of the invention are used to hydrolyze cellulose comprising a linear chain of β-1,4-linked glucose moieties, and/or hemicellulose as a complex structure that varies from plant to plant. In one aspect, enzymes of the invention are used to hydrolyze hemicelluloses containing a backbone of β-1,4 linked xylose molecules with intermittent branches of arabinose, galactose, glucuronic acid and/or mannose. In one aspect, enzymes of the invention are used to hydrolyze hemicellulose containing non-carbohydrate constituents such as acetyl groups on xylose and ferulic acid esters on arabinose. In one aspect, enzymes of the invention are used to hydrolyze hemicelluloses covalently linked to lignin and/or coupled to other hemicellulose strands via diferulate crosslinks.

[0010] In one aspect, the compositions and methods of the invention are used in the enzymatic digestion of biomass and can comprise use of many different enzymes, including the cellulases and hemicellulases. Lignocellulosic enzymes used to practice the invention can digest cellulose to monomeric sugars, including glucose. In one aspect, compositions used to practice the invention can include mixtures of enzymes, e.g., glycosyl hydrolases, glucose oxidases, xylanases, xylosidases (e.g., β-xylosidases), cellobiohydrolases, and/or arabinofuranosidases or other enzymes that can digest hemicellulose to monomer sugars. Mixtures of the invention can comprise, or consist of, only enzymes of this invention, or can include at least one enzyme of this invention and another enzyme, which can also be a lignocellulosic enzyme and/or any other enzyme, e.g., a glucose oxidase.

[0011] In one aspect, compositions used to practice the invention include a “cellulase” that is a mixture of at least three different enzyme types, (1) endoglucanase, which cleaves internal β-1,4 linkages resulting in shorter glucooligosaccharides, (2) cellobiohydrolase, which acts in an “exo” manner processively releasing cellobiose units (β-1,4 glucose—glucose disaccharide), and (3) β-glucosidase, releasing glucose monomer from short cellooligosaccharides (e.g. cellobiose).

[0012] In one aspect, the enzymes of the invention have a glucanase, e.g., an endoglucanase, activity, e.g., catalyzing hydrolysis of internal endo-β-1,4- and/or β-1,3-glucanase linkages. In one aspect, the endoglucanase activity (e.g., endo-1,4-beta-D-glucan 4-glucano hydrolase activity) comprises hydrolysis of 1,4- and/or β-1,3-beta-D-glycosidic linkages in cellulose, cellulose derivatives (e.g., carboxy methyl cellulose and hydroxy ethyl cellulose) lichenin, beta-1,4 bonds in mixed beta-1,3 glucans, such as cereal beta-D-glucans or xyloglucans and other plant material containing cellulosic parts.

[0013] In one aspect, the enzymes of the invention have endoglucanase (e.g., endo-beta-1,4-glucanases, EC 3.2.1.4; endo-beta-1,3(1)-glucanases, EC 3.2.1.6; endo-beta-1,3-glucanases, EC 3.2.1.39) activity and can hydrolyze internal β-1,4- and/or β-1,3-glucosidic linkages in cellulose and glucan to produce smaller molecular weight glucose and glucose oligomers. The invention provides methods for producing smaller molecular weight glucose and glucose oligomers using these enzymes of the invention.

[0014] In one aspect, the enzymes of the invention are used to generate glucans, e.g., polysaccharides formed from 1,4-β- and/or 1,3-glycoside-linked D-glucopyranose. In one aspect, the endoglucanases of the invention are used in the food industry, e.g., for baking and fruit and vegetable processing, breakdown of agricultural waste, in the manufacture of animal feed, in pulp and paper production, textile manufacture and household and industrial cleaning agents. In one aspect, the enzymes, e.g., endoglucanases, of the invention are produced by a microorganism, e.g., by a fungi and/or a bacteria.

[0015] In one aspect, the enzymes, e.g., endoglucanases, of the invention are used to hydrolyze beta-glucans (β-glucans) which are major non-starch polysaccharides of cereals. The glucan content of a polysaccharide can vary significantly depending on variety and growth conditions. The physicochemical properties of this polysaccharide are such that it gives rise to viscous solutions or even gels under oxidative conditions. In addition glucans have high water-binding capacity. All of these characteristics present problems for several industries including brewing, baking, animal nutrition. In brewing applications, the presence of glucan results in wort filterability and haze formation issues. In baking applications (especially for cookies and crackers), glucans can create sticky doughs that are difficult to machine and reduce biscuit size. Thus, the enzymes, e.g., endoglucanases, of the invention are used to decrease the amount of β-glucan in a β-glucan-comprising composition, e.g., enzymes of the invention are used in processes to decrease the viscosity of solutions or gels; to decrease the water-binding capacity of a composition, e.g., a β-glucan-comprising composition; in brewing processes (e.g., to increase wort filterability and decrease haze formation), to decrease the stickiness of doughs, e.g., those for making cookies, breads, biscuits and the like.

[0016] In addition, carbohydrates (e.g., β-glucan) are implicated in rapid rehydration of baked products resulting in loss of crispiness and reduced shelf-life. Thus, the enzymes, e.g., endoglucanases, of the invention are used to retain crispiness, increase crispiness, or reduce the rate of loss of crispiness, and to increase the shelf-life of any carbohydrate-comprising food, feed or drink, e.g., a β-glucan-comprising food, feed or drink.

[0017] Enzymes, e.g., endoglucanases, of the invention are used to decrease the viscosity of gut contents (e.g., in animals, such as ruminant animals, or humans), e.g., those with cereal diets. Thus, in alternative aspects, enzymes, e.g., endoglucanases, of the invention are used to positively affect the digestibility of a food or feed and animal (e.g., human or domestic animal) growth rate, and in one aspect, are used to higher generate feed conversion efficiencies. For monogastric animal feed applications with cereal diets, beta-glucan is a contributing factor to viscosity of gut contents and thereby adversely affects the digestibility of the feed and animal growth rate. For ruminant animals, these beta-glucans represent substantial components of fiber intake and more complete digestion of glucans would facilitate higher feed conversion efficiencies. Accordingly, the invention provides animal feeds and foods comprising endoglucanases of the invention, and in one aspect, these enzymes are active in an animal digestive tract, e.g., in a stomach and/or intestine.

[0018] Enzymes, e.g., endoglucanases, of the invention are used to digest cellulose or any beta-1,4-linked glucan-comprising synthetic or natural material, including those found in any plant material. Enzymes, e.g., endoglucanases, of the invention are used as commercial enzymes to digest cellulose from any source, including all biological sources, such as plant biomasses, e.g., corn, grains, grasses (e.g., Indian grass, such as Sorghastrum nutans; or, switch grass, e.g., Panicum species, such as Panicum virgatum); also including a monocot or a dicot, or a monocot corn, sugarcane or parts thereof (e.g., cane tops), rice, wheat, barley, switchgrass or Miscanthus; or a dicot oilseed crop, soy, canola, rapeseed, flax, cotton, palm oil, sugar beet, peanut, tree, poplar or lupine; or, woods or wood processing byproducts, such as wood waste, e.g., in the wood processing, pulp and/or paper industry, in textile manufacture and in household and industrial cleaning agents, and/or in biomass waste processing.

[0019] In one aspect the invention provides compositions (e.g., pharmaceutical compositions, foods, feeds, drugs, dietary supplements) comprising the enzymes, polypeptides or polynucleotides of the invention. These compositions can be formulated in a variety of forms, e.g., as pills, capsules, tablets, gels, geltabs, lotions, pills, injectables, implants, liquids, sprays, powders, food, additives, supplements, feed or feed pellets, or as any type of encapsulated form, or any type of formulation.

[0020] The invention provides isolated, synthetic or recombinant nucleic acids comprising a nucleic acid sequence having at least about 50%, 51%, 52%, 53%, 54%, 55%, 56%, 57%, 58%, 59%, 60%, 61%, 62%, 63%, 64%, 65%, 66%, 67%, 68%, 69%, 70%, 71%, 72%, 73%, 74%, 75%, 76%, 77%, 78%, 79%, 80%, 81%, 82%, 83%, 84%, 85%, 86%, 87%, 88%, 89%, 90%, 91%, 92%, 93%, 94%, 95%, 96%, 97%, 98%, 99%, or more, or complete (100%) sequence identity (homology) to an exemplary nucleic acid of the invention, including SEQ ID NO:1, SEQ ID NO:3, SEQ ID NO:5, SEQ ID NO:7, SEQ ID NO:9, SEQ ID NO:11, SEQ ID NO:13, SEQ ID NO:15, SEQ ID NO:17, SEQ ID NO:19, SEQ ID NO:21, SEQ ID NO:23, SEQ ID NO:25, SEQ ID NO:27, SEQ ID NO:29, SEQ ID NO:31, SEQ ID NO:33, SEQ ID NO:35, SEQ ID NO:37, SEQ ID NO:39, SEQ ID NO:41, SEQ ID NO:43, SEQ ID NO:45, SEQ ID NO:47, SEQ ID NO:49, SEQ ID NO:51, SEQ ID NO:53, SEQ ID NO:55, SEQ ID NO:57, SEQ ID NO:59, SEQ ID NO:61, SEQ ID NO:63, SEQ ID NO:65, SEQ ID NO:67, SEQ ID NO:69, SEQ ID NO:71, SEQ ID NO:73, SEQ ID NO:75, SEQ ID NO:77, SEQ ID NO:79, SEQ ID NO:81, SEQ ID NO:83, SEQ ID NO:85, SEQ ID NO:87, SEQ ID NO:89, SEQ ID NO:91, SEQ ID NO:93, SEQ ID NO:95, SEQ ID NO:97, SEQ ID NO:99, SEQ ID NO:101, SEQ ID NO:103, SEQ ID NO:105, SEQ ID NO:107, SEQ ID NO:109, SEQ ID NO:111, SEQ ID NO:113, SEQ ID NO:115, SEQ ID NO:117, SEQ ID NO:119, SEQ ID NO:121, SEQ ID NO:123, SEQ ID NO:125, SEQ ID NO:127, SEQ ID NO:129, SEQ ID NO:131, SEQ ID NO:133, SEQ ID NO:135, SEQ ID NO:137, SEQ ID NO:139, SEQ ID NO:141, SEQ ID NO:143, SEQ ID NO:145, SEQ ID NO:147, SEQ ID NO:149, SEQ ID NO:151, SEQ ID NO:153, SEQ ID NO:155, SEQ ID NO:157, SEQ ID NO:159, SEQ ID NO:161, SEQ ID NO:163, SEQ ID NO:165, SEQ ID NO:167, SEQ ID NO:169, SEQ ID NO:171, SEQ ID NO:173, SEQ ID NO:175, SEQ ID NO:177, SEQ ID NO:179, SEQ ID NO:181, SEQ ID NO:183, SEQ ID NO:185, SEQ ID NO:187, SEQ ID NO:189, SEQ ID NO:191, SEQ ID NO:193, SEQ ID NO:195, SEQ ID NO:197, SEQ ID NO:199, SEQ ID NO:201, SEQ ID NO:203, SEQ ID NO:205, SEQ ID NO:207, SEQ ID NO:209, SEQ ID NO:211, SEQ ID NO:213, SEQ ID NO:215, SEQ ID NO:217, SEQ ID NO:219, SEQ ID NO:221, SEQ ID NO:223, SEQ ID NO:225, SEQ ID NO:227, SEQ ID NO:229, SEQ ID NO:231, SEQ ID NO:233, SEQ ID NO:235, SEQ ID NO:237, SEQ ID NO:239, SEQ ID NO:241, SEQ ID NO:243, SEQ ID NO:245, SEQ ID NO:247, SEQ ID NO:249, SEQ ID NO:251, SEQ ID NO:253, SEQ ID NO:255, SEQ ID NO:257, SEQ ID NO:259, SEQ ID NO:261, SEQ ID NO:263, SEQ ID NO:265, SEQ ID NO:267, SEQ ID NO:269, SEQ ID NO:271, SEQ ID NO:273, SEQ ID NO:275, SEQ ID NO:277, SEQ ID NO:279, SEQ ID NO:281, SEQ ID NO:283, SEQ ID NO:285, SEQ ID NO:287, SEQ ID NO:289, SEQ ID NO:291, SEQ ID NO:293, SEQ ID NO:295, SEQ ID NO:297, SEQ ID NO:299, SEQ ID NO:301, SEQ ID NO:303, SEQ ID NO:305, SEQ ID NO:307, SEQ ID NO:309, SEQ ID NO:311, SEQ ID NO:313, SEQ ID NO:315, SEQ ID NO:317, SEQ ID NO:319, SEQ ID NO:321, SEQ ID NO:323, SEQ ID NO:325, SEQ ID NO:327, SEQ ID NO:329, SEQ ID NO:331, SEQ ID NO:333, SEQ ID NO:335, SEQ ID NO:337, SEQ ID NO:339, SEQ ID NO:341, SEQ ID NO:343, SEQ ID NO:345, SEQ ID NO:347, SEQ ID NO:349, SEQ ID NO:351, SEQ ID NO:353, SEQ ID NO:355, SEQ ID NO:357, SEQ ID NO:359, SEQ ID NO:361, SEQ ID NO:363, SEQ ID NO:365, SEQ ID NO:367, SEQ ID NO:369, SEQ ID NO:370, SEQ ID NO:372, SEQ ID NO:373, SEQ ID NO:375, SEQ ID NO:376, SEQ ID NO:378, SEQ ID NO:379, SEQ ID NO:381, SEQ ID NO:382, SEQ ID NO:384, SEQ ID NO:385, SEQ ID NO:387, SEQ ID NO:388, SEQ ID NO:390, SEQ ID NO:391, SEQ ID NO:393, SEQ ID NO:394, SEQ ID NO:396, SEQ ID NO:397, SEQ ID NO:399, SEQ ID NO:400, SEQ ID NO:402, SEQ ID NO:403, SEQ ID NO:405, SEQ ID NO:406, SEQ ID NO:408, SEQ ID NO:409, SEQ ID NO:411, SEQ ID NO:412, SEQ ID NO:414, SEQ ID NO:415, SEQ ID NO:417, SEQ ID NO:418, SEQ ID NO:420, SEQ ID NO:421, SEQ ID NO:423, SEQ ID NO:425, SEQ ID NO:427, SEQ ID NO:429, SEQ ID NO:431, SEQ ID NO:433, SEQ ID NO: 435, SEQ ID NO:437, SEQ ID NO:439, SEQ ID NO:441, SEQ ID NO:443, SEQ ID NO:445, SEQ ID NO:447, SEQ ID NO:449, SEQ ID NO:451, SEQ ID NO:453, SEQ ID NO:455, SEQ ID NO:457, SEQ ID NO:459, SEQ ID NO:461, SEQ ID NO:463, SEQ ID NO:465, SEQ ID NO:467, SEQ ID NO:469 and/or SEQ ID NO:471, SEQ ID NO:480, SEQ ID NO:481, SEQ ID NO:482, SEQ ID NO:483, SEQ ID NO:484, SEQ ID NO:485, SEQ ID NO:486, SEQ ID NO:487, SEQ ID NO:488, all the odd numbered SEQ ID NOs: between SEQ ID NO:489 and SEQ ID NO:700, SEQ ID NO:707, SEQ ID NO:708, SEQ ID NO:709, SEQ ID NO:710, SEQ ID NO:711, SEQ ID NO:712, SEQ ID NO:713, SEQ ID NO:714, SEQ ID NO:715, SEQ ID NO:716, SEQ ID NO:717, SEQ ID NO:718, and/or SEQ ID NO:720; which include both cDNA coding sequences and genomic (e.g., “gDNA”) sequences, and also including the sequences of Tables 1 to 4 (all of these sequences are “exemplary nucleic acids of the invention”), and the Examples, below (and these sequence are also set forth in the sequence listing), over a region of at least about 10, 15, 20, 25, 30, 35, 40, 45, 50, 75, 100, 150, 200, 250, 300, 350, 400, 450, 500, 550, 600, 650, 700, 750, 800, 850, 900, 950, 1000, 1050, 1100, 1150, 1200, 1250, 1300, 1350, 1400, 1450, 1500, 1550, 1600, 1650, 1700, 1750, 1800, 1850, 1900, 1950, 2000, 2050, 2100, 2200, 2250, 2300, 2350, 2400, 2450, 2500, or more residues; or over a region consisting of the protein coding region (e.g., the cDNA) or the genomic sequence; and all of these nucleic acid sequences, and the polypeptides they encode, encompass “sequences of the invention”.

[0021] In alternative aspects, these nucleic acids of the invention encode at least one polypeptide having a lignocellulolytic activity, e.g., a glycosyl hydrolase, cellulase, endoglucanase, cellobiohydrolase, β-glucosidase(beta-glucosidase), xylanase, xylosidase (e.g., β-xylosidase) and/or arabinofuranosidase activity. In alternative embodiments, a nucleic acid of the invention can encode a polypeptide capable of generating an antibody (or any binding fragment thereof) that can specifically bind to an exemplary polypeptide of the invention (listed below), or, these nucleic acids can be used as probes for identifying or isolating lignocellulotic enzyme-encoding nucleic acids, or to inhibit the expression of lignocellulotic enzyme-expressing nucleic acids (all these aspects referred to as the “nucleic acids of the invention”). In one aspect, the sequence identities are determined by analysis with a sequence comparison algorithm or by a visual inspection.

[0022] Nucleic acids of the invention also include isolated, synthetic or recombinant nucleic acids encoding an exemplary polypeptide (or peptide) of the invention which include polypeptides (e.g., enzymes) of the invention having the sequence of (or the subsequences of, or enzymatically active fragments of) SEQ ID NO:2, SEQ ID NO:4, SEQ ID NO:6, SEQ ID NO:8, SEQ ID NO:10, SEQ ID NO:12, SEQ ID NO:14, SEQ ID NO:16, SEQ ID NO:18, SEQ ID NO:20, SEQ ID NO:22, SEQ ID NO:24, SEQ ID NO:26, SEQ ID NO:28, SEQ ID NO:30, SEQ ID NO:32, SEQ ID NO:34, SEQ ID NO:36, SEQ ID NO:38, SEQ ID NO:40, SEQ ID NO:42, SEQ ID NO:44, SEQ ID NO:46, SEQ ID NO:48, SEQ ID NO:50, SEQ ID NO:52, SEQ ID NO:54, SEQ ID NO:56, SEQ ID NO:58, SEQ ID NO:60, SEQ ID NO:62, SEQ ID NO:64, SEQ ID NO:66, SEQ ID NO:68, SEQ ID NO:70, SEQ ID NO:72, SEQ ID NO:74, SEQ ID NO:76, SEQ ID NO:78, SEQ ID NO:80, SEQ ID NO:82, SEQ ID NO:84, SEQ ID NO:86, SEQ ID NO:88, SEQ ID NO:90, SEQ ID NO:92, SEQ ID NO:94, SEQ ID NO:96, SEQ ID NO:98, SEQ ID NO:100, SEQ ID NO:102, SEQ ID NO:104, SEQ ID NO:106, SEQ ID NO:108, SEQ ID NO:110, SEQ ID NO:112, SEQ ID NO:114, SEQ ID NO:116, SEQ ID NO:118, SEQ ID NO:120, SEQ ID NO:122, SEQ ID NO:124, SEQ ID NO:126, SEQ ID NO:128, SEQ ID NO:130, SEQ ID NO:132, SEQ ID NO:134, SEQ ID NO:136, SEQ ID NO:138, SEQ ID NO:140, SEQ ID NO:142, SEQ ID NO:143, SEQ ID NO:146, SEQ ID NO:148, SEQ ID NO:150, SEQ ID NO:152, SEQ ID NO:154, SEQ ID NO:156, SEQ ID NO:158, SEQ ID NO:160, SEQ ID NO:162, SEQ ID NO:164, SEQ ID NO:166, SEQ ID NO:168, SEQ ID NO:170, SEQ ID NO:172, SEQ ID NO:174, SEQ ID NO:176, SEQ ID NO:178, SEQ ID NO:180, SEQ ID NO:182, SEQ ID NO:184, SEQ ID NO:186, SEQ ID NO:188, SEQ ID NO:190, SEQ ID NO:192, SEQ ID NO:194, SEQ ID NO:196, SEQ ID NO:198, SEQ ID NO:200, SEQ ID NO:202, SEQ ID NO:204, SEQ ID NO:206, SEQ ID NO:209, SEQ ID NO:210, SEQ ID NO:212, SEQ ID NO:214, SEQ ID NO:216, SEQ ID NO:218, SEQ ID NO:220, SEQ ID NO:222, SEQ ID NO:224, SEQ ID NO:226, SEQ ID NO:228, SEQ ID NO:230, SEQ ID NO:232, SEQ ID NO:234, SEQ ID NO:236, SEQ ID NO:238, SEQ ID NO:240, SEQ ID NO:242, SEQ ID NO:244, SEQ ID NO:246, SEQ ID NO:248, SEQ ID NO:250, SEQ ID NO:252, SEQ ID NO:254, SEQ ID NO:256, SEQ ID NO:258, SEQ ID NO:260, SEQ ID NO:262, SEQ ID NO:264, SEQ ID NO:266, SEQ ID NO:268, SEQ ID NO:270, SEQ ID NO:272, SEQ ID NO:274, SEQ ID NO:276, SEQ ID NO:278, SEQ ID NO:280, SEQ ID NO:282, SEQ ID NO:284, SEQ ID NO:286, SEQ ID NO:288, SEQ ID NO:290, SEQ ID NO:292, SEQ ID NO:294, SEQ ID NO:296, SEQ ID NO:298, SEQ ID NO:300, SEQ ID NO:302, SEQ ID NO:304, SEQ ID NO:306, SEQ ID NO:308, SEQ ID NO:310, SEQ ID NO:312, SEQ ID NO:314, SEQ ID NO:316, SEQ ID NO:318, SEQ ID NO:320, SEQ ID NO:322, SEQ ID NO:324, SEQ ID NO:326, SEQ ID NO:328, SEQ ID NO:330, SEQ ID NO:332, SEQ ID NO:334, SEQ ID NO:336, SEQ ID NO:338, SEQ ID NO:340, SEQ ID NO:342, SEQ ID NO:344, SEQ ID NO:346, SEQ ID NO:348, SEQ ID NO:350, SEQ ID NO:352, SEQ ID NO:354, SEQ ID NO:356, SEQ ID NO:358, SEQ ID NO:360, SEQ ID NO:362, SEQ ID NO:364, SEQ ID NO:366, SEQ ID NO:368, SEQ ID NO:371, SEQ ID NO:374, SEQ ID NO:377, SEQ ID NO:380, SEQ ID NO:383, SEQ ID NO:386, SEQ ID NO:389, SEQ ID NO:392, SEQ ID NO:395, SEQ ID NO:398, SEQ ID NO:401, SEQ ID NO:404, SEQ ID NO:407, SEQ ID NO:410, SEQ ID NO:413, SEQ ID NO:416, SEQ ID NO:419, SEQ ID NO:422, SEQ ID NO:424, SEQ ID NO:426, SEQ ID NO:428, SEQ ID NO:430, SEQ ID NO:432, SEQ ID NO:434, SEQ ID NO: 436, SEQ ID NO:438, SEQ ID NO:440, SEQ ID NO:442, SEQ ID NO:444, SEQ ID NO:446, SEQ ID NO:448, SEQ ID NO:450, SEQ ID NO:452, SEQ ID NO:454, SEQ ID NO:456, SEQ ID NO:458, SEQ ID NO:460, SEQ ID NO:462, SEQ ID NO:464, SEQ ID NO:466, SEQ ID NO:468, SEQ ID NO:470 and/or SEQ ID NO:472, SEQ ID NO:473, SEQ ID NO:474, SEQ ID NO:475, SEQ ID NO:476, SEQ ID NO:477, SEQ ID NO:478, SEQ ID NO:479, all the even numbered SEQ ID NOs: between SEQ ID NO:490 and SEQ ID NO:700, SEQ ID NO:719 and/or SEQ ID NO:721, including sequences as set forth in Tables 1 to 4, and the sequences as set forth in the Sequence Listing (all of these sequences are “exemplary enzymes/polypeptides (or nucleic acids) of the invention”), and enzymatically active subsequences (fragments) thereof and/or immunologically active subsequences thereof (such as epitopes or immunogens) (all “peptides of the invention”) and variants thereof (all of these sequences encompassing polypeptide and peptide sequences of the invention).

[0023] In one embodiment, the polypeptide of the invention has a lignocellulosic activity, e.g., a glycosyl hydrolase, cellulase, endoglucanase, cellobiohydrolase, β-glucosidase(beta-glucosidase), xylanase, xylosidase (e.g., β-xylosidase) and/or an arabinofuranosidase activity.

[0024] In one aspect, the invention provides nucleic acids encoding lignocellulosic enzymes, e.g., glycosyl hydrolase, cellulase, endoglucanase, cellobiohydrolase, β-glucosidase(beta-glucosidase), xylanase, xylosidase (e.g., β-xylosidase), arabinofuranosidase, having a common novelty in that they are derived from mixed cultures. The invention provides cellulose or oligosaccharide hydrolyzing (degrading) enzyme-encoding nucleic acids isolated from mixed cultures comprising a polynucleotide of the invention, e.g., a sequence having at least about 10%, 15%, 20%, 25%, 30%, 35%, 40%, 45%, 50%, 51%, 52%, 53%, 54%, 55%, 56%, 57%, 58%, 59%, 60%, 61%, 62%, 63%, 64%, 65%, 66%, 67%, 68%, 69%, 70%, 71%, 72%, 73%, 74%, 75%, 76%, 77%, 78%, 79%, 80%, 81%, 82%, 83%, 84%, 85%, 86%, 87%, 88%, 89%, 90%, 91%, 92%, 93%, 94%, 95%, 96%, 97%, 98%, 99%, or more, or complete (100%) sequence identity to an exemplary nucleic acid of the invention, e.g., SEQ ID NO:1, SEQ ID NO:3, etc., through SEQ ID NO:471, SEQ ID NO:480, SEQ ID NO:481, SEQ ID NO:482, SEQ ID NO:483, SEQ ID NO:484, SEQ ID NO:485, SEQ ID NO:486, SEQ ID NO:487, SEQ ID NO:488, all the odd numbered SEQ ID NOs: between SEQ ID NO:489 and SEQ ID NO:700, SEQ ID NO:707, SEQ ID NO:708, SEQ ID NO:709, SEQ ID NO:710, SEQ ID NO:711, SEQ ID NO:712, SEQ ID NO:713, SEQ ID NO:714, SEQ ID NO:715, SEQ ID NO:716, SEQ ID NO:717, SEQ ID NO:718, and/or SEQ ID NO:720 (see Tables 1 to 3, and the sequence listing), over a region of at least about 50, 75, 100, 150, 200, 250, 300, 350, 400, 450, 500, 550, 600, 650, 700, 750, 800, 850, 900, 950, 1000, 1050, 1100, 1150, or more, or over the full length of a coding sequence (e.g., a cDNA) or a genomic sequence (e.g., comprising exons and introns).

[0025] In one aspect, the invention provides nucleic acids encoding lignocellulosic enzymes, e.g., cellulase enzyme, endoglucanase enzyme, cellobiohydrolase enzyme, β-glucosidase enzyme (beta-glucosidase enzyme), xylanase enzyme, xylosidase (e.g., β-xylosidase) enzyme and/or an arabinofuranosidase enzyme-encoding; and/or glucose oxidase enzyme-encoding, nucleic acids, including exemplary polynucleotide sequences of the invention, see also Tables 1 to 4, and the Sequence Listing, and the polypeptides encoded by them, including enzymes of the invention, e.g., exemplary polypeptides of the invention, e.g., SEQ ID NO:2, SEQ ID NO:4, etc., through to SEQ ID NO:472 SEQ ID NO:473, SEQ ID NO:474, SEQ ID NO:475, SEQ ID NO:476, SEQ ID NO:477, SEQ ID NO:478, SEQ ID NO:479, all the even numbered SEQ ID NOs: between SEQ ID NO:490 and SEQ ID NO:700, SEQ ID NO:719 and/or SEQ ID NO:721, (see Sequence Listing, and see also Tables 1 to 4), having a common novelty in that they are derived from a common source, e.g., an environmental source. Tables 2 and 3, below, indicate the initial source of some of the exemplary enzymes of the invention.

[0026] In one aspect, the invention also provides a lignocellulosic enzyme-encoding, e.g., a glycosyl hydrolase, an endoglucanase enzyme, cellobiohydrolase enzyme, β-glucosidase enzyme (beta-glucosidase enzyme), xylanase enzyme, xylosidase (e.g., β-xylosidase) and/or an arabinofuranosidase enzyme-encoding; and/or glucose oxidase enzyme-encoding, nucleic acids with a common novelty in that they are derived from environmental sources, e.g., mixed environmental sources.

[0027] In one aspect, the sequence comparison algorithm is a BLAST version 2.2.2 algorithm where a filtering setting is set to blastall -p blastp -d “nr pataa” -F F, and all other options are set to default.

[0028] Another aspect of the invention is an isolated, synthetic or recombinant nucleic acid including at least 10, 15, 20, 25, 30, 35, 40, 45, 50, 75, 100, 150, 200, 250, 300, 350, 400, 450, 500, 550, 600, 650, 700, 750, 800, 850, 900, 950, 1000, 1050, 1100, 1150, 1200, 1250, 1300, 1350, 1400, 1450, 1500, 1550, 1600, 1650, 1700, 1750, 1800, 1850, 1900, 1950, 2000, 2050, 2100, 2200, 2250, 2300, 2350, 2400, 2450, 2500, or more consecutive bases of a nucleic acid sequence of the invention, sequences substantially identical thereto, and the sequences complementary thereto.

[0029] In one aspect, the isolated, synthetic or recombinant nucleic acids of the invention encode a polypeptide having a lignocellulosic activity, e.g., a glycosyl hydrolase, cellulase, endoglucanase, cellobiohydrolase, β-glucosidase(beta-glucosidase), xylanase, xylosidase (e.g., β-xylosidase) and/or arabinofuranosidase activity; and/or glucose oxidase activity, which is thermostable. The polypeptide can retain a lignocellulosic activity under conditions comprising a temperature range of between about 37° C. to about 95° C.; between about 55° C. to about 85° C., between about 70° C. to about 95° C., or, between about 90° C. to about 95° C. The polypeptide can retain a lignocellulosic activity in temperatures in the range between about 1° C. to about 5° C., between about 5° C. to about 15° C., between about 15° C. to about 25° C., between about 25° C. to about 37° C., between about 37° C. to about 95° C., 96° C., 97° C., 98° C. or 99° C., between about 55° C. to about 85° C., between about 70° C. to about 75° C., or between about 90° C. to about 99° C., or 95° C., 96° C., 97° C., 98° C. or 99° C., or more.

[0030] In another aspect, the isolated, synthetic or recombinant nucleic acid encodes a polypeptide having a lignocellulosic activity, e.g., a glycosyl hydrolase, cellulase, endoglucanase, cellobiohydrolase, β-glucosidase(beta-glucosidase), xylanase, xylosidase (e.g., β-xylosidase) and/or arabinofuranosidase activity; and/or glucose oxidase activity, that can hydrolyze (degrade) soluble cellooligsaccharides and arabinoxylan oligomers into monomer xylose, arabinose and glucose, which is thermotolerant. The polypeptide can retain a lignocellulosic activity or glucose oxidase activity after exposure to a temperature in the range from greater than 37° C. to about 95° C. or anywhere in the range from greater than 55° C. to about 85° C. The polypeptide can retain a lignocellulosic activity after exposure to a temperature in the range between about 1° C. to about 5° C., between about 5° C. to about 15° C., between about 15° C. to about 25° C., between about 25° C. to about 37° C., between about 37° C. to about 95° C., 96° C., 97° C., 98° C. or 99° C., between about 55° C. to about 85° C., between about 70° C. to about 75° C., or between about 90° C. to about 95° C., or more. In one aspect, the polypeptide retains a lignocellulosic activity after exposure to a temperature in the range from greater than 90° C. to about 99° C., or 95° C., 96° C., 97° C., 98° C. or 99° C., at about pH 4.5, or more.

[0031] The invention provides isolated, synthetic or recombinant nucleic acids comprising a sequence that hybridizes under stringent conditions to a nucleic acid of the invention, including an exemplary nucleic acid sequence of the invention, e.g., the sequence of SEQ ID NO:1, SEQ ID NO:3, etc. through SEQ ID NO:471, SEQ ID NO:480, SEQ ID NO:481, SEQ ID NO:482, SEQ ID NO:483, SEQ ID NO:484, SEQ ID NO:485, SEQ ID NO:486, SEQ ID NO:487, SEQ ID NO:488, all the odd numbered SEQ ID NOs: between SEQ ID NO:489 and SEQ ID NO:700, SEQ ID NO:707, SEQ ID NO:708, SEQ ID NO:709, SEQ ID NO:710, SEQ ID NO:711, SEQ ID NO:712, SEQ ID NO:713, SEQ ID NO:714, SEQ ID NO:715, SEQ ID NO:716, SEQ ID NO:717, SEQ ID NO:718, and/or SEQ ID NO:720 (see Tables 1 to 3, and the Sequence Listing), or fragments or subsequences thereof. In one aspect, the nucleic acid encodes a polypeptide having a lignocellulosic activity, e.g., a glycosyl hydrolase, cellulase, endoglucanase, β-glucosidase(beta-glucosidase), xylanase, xylosidase (e.g., β-xylosidase) and/or arabinofuranosidase activity, or can hydrolyze (degrade) soluble cellooligsaccharides and arabinoxylan oligomers into monomer xylose, arabinose and glucose. The nucleic acid can be at least about 10, 15, 20, 25, 30, 35, 40, 45, 50, 75, 100, 150, 200, 250, 300, 350, 400, 450, 500, 550, 600, 650, 700, 750, 800, 850, 900, 950, 1000, 1050, 1100, 1150, 1200 or more residues in length or the full length of the gene or transcript (e.g., cDNA). In one aspect, the stringent conditions comprise a wash step comprising a wash in 0.2×SSC at a temperature of about 65° C. for about 15 minutes.

[0032] The invention provides a nucleic acid probe for identifying or isolating a nucleic acid encoding a polypeptide having a lignocellulosic activity, e.g., a glycosyl hydrolase, cellulase, endoglucanase, β-glucosidase(beta-glucosidase), xylanase, xylosidase (e.g., β-xylosidase) and/or arabinofuranosidase activity, or can hydrolyze (degrade) soluble cellooligsaccharides and arabinoxylan oligomers into monomer xylose, arabinose and glucose, wherein the probe comprises at least about 10, 15, 20, 25, 30, 35, 40, 45, 50, 55, 60, 65, 70, 75, 80, 85, 90, 95, 100, 150, 200, 250, 300, 350, 400, 450, 500, 550, 600, 650, 700, 750, 800, 850, 900, 950, 1000 or more, consecutive bases of a sequence comprising a sequence of the invention, or fragments or subsequences thereof, wherein the probe identifies the nucleic acid by binding or hybridization. The probe can comprise an oligonucleotide comprising at least about 10 to 50, about 20 to 60, about 30 to 70, about 40 to 80, or about 60 to 100 consecutive bases of a sequence comprising a sequence of the invention, or fragments or subsequences thereof.

[0033] The invention provides a nucleic acid probe for identifying or isolating a nucleic acid encoding a polypeptide having a lignocellulosic activity, e.g., a glycosyl hydrolase, cellulase, endoglucanase, β-glucosidase(beta-glucosidase), xylanase, xylosidase (e.g., β-xylosidase) and/or arabinofuranosidase activity, or can hydrolyze (degrade) soluble cellooligsaccharides and arabinoxylan oligomers into monomer xylose, arabinose and glucose, wherein the probe comprises a nucleic acid comprising a sequence at least about 10, 15, 20, 30, 40, 50, 60, 70, 80, 90, 100, 150, 200, 250, 300, 350, 400, 450, 500, 550, 600, 650, 700, 750, 800, 850, 900, 950, 1000 or more residues of a nucleic acid of the invention, e.g., a polynucleotide having at least about 50%, 51%, 52%, 53%, 54%, 55%, 56%, 57%, 58%, 59%, 60%, 61%, 62%, 63%, 64%, 65%, 66%, 67%, 68%, 69%, 70%, 71%, 72%, 73%, 74%, 75%, 76%, 77%, 78%, 79%, 80%, 81%, 82%, 83%, 84%, 85%, 86%, 87%, 88%, 89%, 90%, 91%, 92%, 93%, 94%, 95%, 96%, 97%, 98%, 99%, or more, or complete (100%) sequence identity to an exemplary nucleic acid of the invention. In one aspect, the sequence identities are determined by analysis with a sequence comparison algorithm or by visual inspection. In alternative aspects, the probe can comprise an oligonucleotide comprising at least about 10 to 50, about 20 to 60, about 30 to 70, about 40 to 80, or about 60 to 100 consecutive bases of a nucleic acid sequence of the invention, or a subsequence thereof.

[0034] The invention provides an amplification primer pair for amplifying (e.g., by PCR) a nucleic acid encoding a polypeptide having a lignocellulosic activity, e.g., a glycosyl hydrolase, cellulase, endoglucanase, β-glucosidase(beta-glucosidase), xylanase, xylosidase (e.g., β-xylosidase) and/or arabinofuranosidase activity, or can hydrolyze (degrade) soluble cellooligsaccharides and arabinoxylan oligomers into monomer xylose, arabinose and glucose, wherein the primer pair is capable of amplifying a nucleic acid comprising a sequence of the invention, or fragments or subsequences thereof. One or each member of the amplification primer sequence pair can comprise an oligonucleotide comprising at least about 10 to 50, or more, consecutive bases of the sequence, or about 10, 11, 12, 13, 14, 15, 16, 17, 18, 19, 20, 21, 22, 23, 24, 25, 26, 27, 28, 29, 30, 31, 32, 33, 34, 35, 36 or more consecutive bases of the sequence. The invention provides amplification primer pairs, wherein the primer pair comprises a first member having a sequence as set forth by about the first (the 5′) 12, 13, 14, 15, 16, 17, 18, 19, 20, 21, 22, 23, 24, 25, 26, 27, 28, 29, 30, 31, 32, 33, 34, 35, 36 or more residues of a nucleic acid of the invention, and a second member having a sequence as set forth by about the first (the 5′) 12, 13, 14, 15, 16, 17, 18, 19, 20, 21, 22, 23, 24, 25, 26, 27, 28, 29, 30, 31, 32, 33, 34, 35, 36 or more residues of the complementary strand of the first member.

[0035] The invention provides cellulase-encoding, e.g., endoglucanase, cellobiohydrolase, β-glucosidase(beta-glucosidase), xylanase, xylosidase (e.g., β-xylosidase), arabinofuranosidase, generated by amplification, e.g., polymerase chain reaction (PCR), using an amplification primer pair of the invention. The invention provides cellulase-encoding, e.g., endoglucanase, cellobiohydrolase, β-glucosidase(beta-glucosidase), xylanase, xylosidase (e.g., β-xylosidase), arabinofuranosidase, generated by amplification, e.g., polymerase chain reaction (PCR), using an amplification primer pair of the invention. The invention provides methods of making nucleic acid encoding an enzyme with lignocellulosic activity, e.g., a glycosyl hydrolase, cellulase, endoglucanase, cellobiohydrolase, β-glucosidase(beta-glucosidase), xylanase, xylosidase (e.g., β-xylosidase), arabinofuranosidase, by amplification, e.g., polymerase chain reaction (PCR), using an amplification primer pair of the invention. In one aspect, the amplification primer pair amplifies a nucleic acid from a library, e.g., a gene library, such as an environmental library.

[0036] The invention provides methods of amplifying a nucleic acid encoding a polypeptide having a lignocellulosic activity, e.g., a glycosyl hydrolase, cellulase, endoglucanase, cellobiohydrolase, β-glucosidase(beta-glucosidase), xylanase, xylosidase (e.g., β-xylosidase), arabinofuranosidase, or can hydrolyze (degrade) soluble cellooligsaccharides and arabinoxylan oligomers into monomer xylose, arabinose and glucose, comprising amplification of a template nucleic acid with an amplification primer sequence pair capable of amplifying a nucleic acid sequence of the invention, or fragments or subsequences thereof.

[0037] The invention provides expression cassettes comprising a nucleic acid of the invention or a subsequence thereof. In one aspect, the expression cassette can comprise the nucleic acid that is operably linked to a promoter. The promoter can be a viral, bacterial, mammalian or plant promoter. In one aspect, the plant promoter can be a potato, rice, corn, wheat, tobacco or barley promoter. The promoter can be a constitutive promoter. The constitutive promoter can comprise CaMV35S. In another aspect, the promoter can be an inducible promoter. In one aspect, the promoter can be a tissue-specific promoter or an environmentally regulated or a developmentally regulated promoter. Thus, the promoter can be, e.g., a seed-specific, a leaf-specific, a root-specific, a stem-specific or an abscission-induced promoter. In one aspect, a nucleic acid of the invention encoding an endogenous or heterologous signal sequence (see discussion, below) is expressed using an inducible promoter, an environmentally regulated or a developmentally regulated promoter, a tissue-specific promoter and the like. In alternative aspects, the promoter comprises a seed preferred promoter, such as e.g., the maize gamma zein promoter or the maize ADP-gpp promoter. In one aspect, the signal sequence targets the encoded protein of the invention to a vacuole, the endoplasmic reticulum, the chloroplast or a starch granule.

[0038] In one aspect, the expression cassette can further comprise a plant or plant virus expression vector. The invention provides cloning vehicles comprising an expression cassette (e.g., a vector) of the invention or a nucleic acid of the invention. The cloning vehicle can be a viral vector, a plasmid, a phage, a phagemid, a cosmid, a fosmid, a bacteriophage or an artificial chromosome. The viral vector can comprise an adenovirus vector, a retroviral vector or an adeno-associated viral vector. The cloning vehicle can comprise a bacterial artificial chromosome (BAC), a plasmid, a bacteriophage P1-derived vector (PAC), a yeast artificial chromosome (YAC), or a mammalian artificial chromosome (MAC).

[0039] The invention provides transformed cells comprising a nucleic acid of the invention or an expression cassette (e.g., a vector, plasmid, etc.) of the invention, or a cloning vehicle (e.g., artificial chromosome) of the invention. In one aspect, the transformed cell can be a bacterial cell, a mammalian cell, a fungal cell, a yeast cell, an insect cell or a plant cell. In one aspect, the plant cell can be soybeans, rapeseed, oilseed, tomato, cane sugar, a cereal, a potato, wheat, rice, corn, tobacco or barley cell; the plant cell also can be a monocot or a dicot, or a monocot corn, sugarcane, rice, wheat, barley, Indian grass, switchgrass or Miscanthus; or a dicot oilseed crop, soy, canola, rapeseed, flax, cotton, palm oil, sugar beet, peanut, tree, poplar or lupine.

[0040] The invention provides transgenic non-human animals comprising a nucleic acid of the invention or an expression cassette (e.g., a vector) of the invention. In one aspect, the animal is a mouse, a cow, a rat, a pig, a goat or a sheep.

[0041] The invention provides transgenic plants comprising a nucleic acid of the invention or an expression cassette (e.g., a vector) of the invention. The transgenic plant can be any cereal plant, a corn plant, a potato plant, a tomato plant, a wheat plant, an oilseed plant, a rapeseed plant, a soybean plant, a rice plant, a barley plant or a tobacco plant. The transgenic plant can be a monocot or a dicot, or a monocot corn, sugarcane, rice, wheat, barley, switchgrass or Miscanthus; or a dicot oilseed crop, soy, canola, rapeseed, flax, cotton, palm oil, sugar beet, peanut, tree, poplar or lupine.

[0042] The invention provides transgenic seeds comprising a nucleic acid of the invention or an expression cassette (e.g., a vector) of the invention. The transgenic seed can be a cereal plant, a corn seed, a wheat kernel, an oilseed, a rapeseed, a soybean seed, a palm kernel, a sunflower seed, a sesame seed, a peanut or a tobacco plant seed. The transgenic seed can be derived from a monocot or a dicot, or a monocot corn, sugarcane, rice, wheat, barley, switchgrass or Miscanthus; or a dicot oilseed crop, soy, canola, rapeseed, flax, cotton, palm oil, sugar beet, peanut, tree, poplar or lupine.

[0043] The invention provides an antisense oligonucleotide comprising a nucleic acid sequence complementary to or capable of hybridizing under stringent conditions to a nucleic acid of the invention. The invention provides methods of inhibiting the translation of a lignocellulosic enzyme, e.g., a glycosyl hydrolase, cellulase, endoglucanase, cellobiohydrolase, mannanase, β-glucosidase(beta-glucosidase), xylanase, xylosidase (e.g., β-xylosidase) and/or arabinofuranosidase enzyme message in a cell comprising administering to the cell or expressing in the cell an antisense oligonucleotide comprising a nucleic acid sequence complementary to or capable of hybridizing under stringent conditions to a nucleic acid of the invention. In one aspect, the antisense oligonucleotide is between about 10 to 50, about 20 to 60, about 30 to 70, about 40 to 80, or about 60 to 100 bases in length, e.g., 10, 15, 20, 25, 30, 35, 40, 45, 50, 55, 60, 65, 70, 75, 80, 85, 90, 95, 100 or more bases in length. The invention provides methods of inhibiting the translation of a lignocellulosic enzyme message in a cell comprising administering to the cell or expressing in the cell an antisense oligonucleotide comprising a nucleic acid sequence complementary to or capable of hybridizing under stringent conditions to a nucleic acid of the invention.

[0044] The invention provides double-stranded inhibitory RNA (RNAi, or RNA interference) molecules (including small interfering RNA, or siRNAs, for inhibiting transcription, and microRNAs, or miRNAs, for inhibiting translation) comprising a subsequence of a sequence of the invention. In one aspect, the siRNA is between about 21 to 24 residues, or, about at least 15, 16, 17, 18, 19, 20, 21, 22, 23, 24, 25, 26, 27, 28, 29, 30, 31, 32, 33, 34, 35, 40, 45, 50, 55, 60, 65, 70, 75, 80, 85, 90, 95, 100 or more duplex nucleotides in length. The invention provides methods of inhibiting the expression of a lignocellulosic enzyme, e.g., a glycosyl hydrolase, cellulase, endoglucanase, cellobiohydrolase, β-glucosidase(beta-glucosidase), xylanase, xylosidase (e.g., β-xylosidase) and/or arabinofuranosidase activity, e.g., can hydrolyze (degrade) soluble cellooligsaccharides and arabinoxylan oligomers into monomer xylose, arabinose and glucose, in a cell comprising administering to the cell or expressing in the cell a double-stranded inhibitory RNA (siRNA or miRNA), wherein the RNA comprises a subsequence of a sequence of the invention.

[0045] The invention provides isolated, synthetic or recombinant polypeptides comprising an amino acid sequence having at least about 50%, 51%, 52%, 53%, 54%, 55%, 56%, 57%, 58%, 59%, 60%, 61%, 62%, 63%, 64%, 65%, 66%, 67%, 68%, 69%, 70%, 71%, 72%, 73%, 74%, 75%, 76%, 77%, 78%, 79%, 80%, 81%, 82%, 83%, 84%, 85%, 86%, 87%, 88%, 89%, 90%, 91%, 92%, 93%, 94%, 95%, 96%, 97%, 98%, 99%, or more, or complete (100%) sequence identity to an exemplary polypeptide or peptide of the invention over a region of at least about 10, 15, 20, 25, 30, 35, 40, 45, 50, 55, 60, 65, 70, 75, 80, 85, 90, 95, 100, 125, 150, 175, 200, 225, 250, 275, 300, 325, 350 or more residues, or over the full length of the polypeptide. In one aspect, the sequence identities are determined by analysis with a sequence comparison algorithm or by a visual inspection. Exemplary polypeptide or peptide sequences of the invention include SEQ ID NO:2, SEQ ID NO:4, SEQ ID NO:6, SEQ ID NO:8, SEQ ID NO:10, SEQ ID NO:12, SEQ ID NO:14, SEQ ID NO:16, SEQ ID NO:18, SEQ ID NO:20, SEQ ID NO:22, SEQ ID NO:24, SEQ ID NO:26, SEQ ID NO:28, SEQ ID NO:30, SEQ ID NO:32, SEQ ID NO:34, SEQ ID NO:36, SEQ ID NO:38, SEQ ID NO:40, SEQ ID NO:42, SEQ ID NO:44, SEQ ID NO:46, SEQ ID NO:48, SEQ ID NO:50, SEQ ID NO:52, SEQ ID NO:54, SEQ ID NO:56, SEQ ID NO:58, SEQ ID NO:60, SEQ ID NO:62, SEQ ID NO:64, SEQ ID NO:66, SEQ ID NO:68, SEQ ID NO:70, SEQ ID NO:72, SEQ ID NO:74, SEQ ID NO:76, SEQ ID NO:78, SEQ ID NO:80, SEQ ID NO:82, SEQ ID NO:84, SEQ ID NO:86, SEQ ID NO:88, SEQ ID NO:90, SEQ ID NO:92, SEQ ID NO:94, SEQ ID NO:96, SEQ ID NO:98, SEQ ID NO:100, SEQ ID NO:102, SEQ ID NO:104, SEQ ID NO:106, SEQ ID NO:108, SEQ ID NO:110, SEQ ID NO:112, SEQ ID NO:114, SEQ ID NO:116, SEQ ID NO:118, SEQ ID NO:120, SEQ ID NO:122, SEQ ID NO:124, SEQ ID NO:126, SEQ ID NO:128, SEQ ID NO:130, SEQ ID NO:132, SEQ ID NO:134, SEQ ID NO:136, SEQ ID NO:138, SEQ ID NO:140, SEQ ID NO:142, SEQ ID NO:143, SEQ ID NO:146, SEQ ID NO:148, SEQ ID NO:150, SEQ ID NO:152, SEQ ID NO:154, SEQ ID NO:156, SEQ ID NO:158, SEQ ID NO:160, SEQ ID NO:162, SEQ ID NO:164, SEQ ID NO:166, SEQ ID NO:168, SEQ ID NO:170, SEQ ID NO:172, SEQ ID NO:174, SEQ ID NO:176, SEQ ID NO:178, SEQ ID NO:180, SEQ ID NO:182, SEQ ID NO:184, SEQ ID NO:186, SEQ ID NO:188, SEQ ID NO:190, SEQ ID NO:192, SEQ ID NO:194, SEQ ID NO:196, SEQ ID NO:198, SEQ ID NO:200, SEQ ID NO:202, SEQ ID NO:204, SEQ ID NO:206, SEQ ID NO:209, SEQ ID NO:210, SEQ ID NO:212, SEQ ID NO:214, SEQ ID NO:216, SEQ ID NO:218, SEQ ID NO:220, SEQ ID NO:222, SEQ ID NO:224, SEQ ID NO:226, SEQ ID NO:228, SEQ ID NO:230, SEQ ID NO:232, SEQ ID NO:234, SEQ ID NO:236, SEQ ID NO:238, SEQ ID NO:240, SEQ ID NO:242, SEQ ID NO:244, SEQ ID NO:246, SEQ ID NO:248, SEQ ID NO:250, SEQ ID NO:252, SEQ ID NO:254, SEQ ID NO:256, SEQ ID NO:258, SEQ ID NO:260, SEQ ID NO:262, SEQ ID NO:264, SEQ ID NO:266, SEQ ID NO:268, SEQ ID NO:270, SEQ ID NO:272, SEQ ID NO:274, SEQ ID NO:276, SEQ ID NO:278, SEQ ID NO:280, SEQ ID NO:282, SEQ ID NO:284, SEQ ID NO:286, SEQ ID NO:288, SEQ ID NO:290, SEQ ID NO:292, SEQ ID NO:294, SEQ ID NO:296, SEQ ID NO:298, SEQ ID NO:300, SEQ ID NO:302, SEQ ID NO:304, SEQ ID NO:306, SEQ ID NO:308, SEQ ID NO:310, SEQ ID NO:312, SEQ ID NO:314, SEQ ID NO:316, SEQ ID NO:318, SEQ ID NO:320, SEQ ID NO:322, SEQ ID NO:324, SEQ ID NO:326, SEQ ID NO:328, SEQ ID NO:330, SEQ ID NO:332, SEQ ID NO:334, SEQ ID NO:336, SEQ ID NO:338, SEQ ID NO:340, SEQ ID NO:342, SEQ ID NO:344, SEQ ID NO:346, SEQ ID NO:348, SEQ ID NO:350, SEQ ID NO:352, SEQ ID NO:354, SEQ ID NO:356, SEQ ID NO:358, SEQ ID NO:360, SEQ ID NO:362, SEQ ID NO:364, SEQ ID NO:366, SEQ ID NO:368, SEQ ID NO:371, SEQ ID NO:374, SEQ ID NO:377, SEQ ID NO:380, SEQ ID NO:383, SEQ ID NO:386, SEQ ID NO:389, SEQ ID NO:392, SEQ ID NO:395, SEQ ID NO:398, SEQ ID NO:401, SEQ ID NO:404, SEQ ID NO:407, SEQ ID NO:410, SEQ ID NO:413, SEQ ID NO:416, SEQ ID NO:419, SEQ ID NO:422, SEQ ID NO:424, SEQ ID NO:426, SEQ ID NO:428, SEQ ID NO:430, SEQ ID NO:432, SEQ ID NO:434, SEQ ID NO: 436, SEQ ID NO:438, SEQ ID NO:440, SEQ ID NO:442, SEQ ID NO:444, SEQ ID NO:446, SEQ ID NO:448, SEQ ID NO:450, SEQ ID NO:452, SEQ ID NO:454, SEQ ID NO:456, SEQ ID NO:458, SEQ ID NO:460, SEQ ID NO:462, SEQ ID NO:464, SEQ ID NO:466, SEQ ID NO:468, SEQ ID NO:470 and/or SEQ ID NO:472, SEQ ID NO:473, SEQ ID NO:474, SEQ ID NO:475, SEQ ID NO:476, SEQ ID NO:477, SEQ ID NO:478, SEQ ID NO:479, all the even numbered SEQ ID NOs: between SEQ ID NO:490 and SEQ ID NO:700, SEQ ID NO:719 and/or SEQ ID NO:721, including Tables 1 to 4, and all the sequences set forth in the Sequence Listing (all of these sequences are “exemplary enzymes/polypeptides of the invention”), and subsequences (including “enzymatically active fragments”) thereof (e.g., “peptides of the invention”) and variants thereof (all of these sequences encompassing polypeptide and peptide sequences of the invention).

[0046] Exemplary polypeptides also include fragments of at least about 10, 15, 20, 25, 30, 35, 40, 45, 50, 75, 80, 85, 90, 95, 100, 150, 200, 250, 300, 350, 400, 450, 500, 550, 600 or more residues in length, or over the full length of an enzyme. Polypeptide or peptide sequences of the invention include sequence encoded by a nucleic acid of the invention. Polypeptide or peptide sequences of the invention include polypeptides or peptides specifically bound by an antibody of the invention (e.g., epitopes), or polypeptides or peptides that can generate an antibody of the invention (e.g., an immunogen).

[0047] In one aspect, a polypeptide of the invention has at least one lignocellulosic enzyme, e.g., a glycosyl hydrolase, cellulase, endoglucanase, cellobiohydrolase, β-glucosidase(beta-glucosidase), xylanase, xylosidase (e.g., β-xylosidase) and/or arabinofuranosidase enzyme. In alternative aspects, a polynucleotide of the invention encodes a polypeptide that has at least one lignocellulosic enzyme activity activity.

[0048] In one aspect, the lignocellulosic enzyme activity, e.g., glycosyl hydrolase, cellulase, endoglucanase, cellobiohydrolase, mannanase, β-glucosidase(beta-glucosidase), xylanase, xylosidase (e.g., β-xylosidase) and/or arabinofuranosidase activity is thermostable. The polypeptide can retain a lignocellulosic enzyme activity under conditions comprising a temperature range about −100° C. to about −80° C., about −80° C. to about −40° C., about −40° C. to about −20° C., about −20° C. to about 0° C., about 0° C. to about 5° C., about 5° C. to about 15° C., about 15° C. to about 25° C., about 25° C. to about 37° C., about 37° C. to about 45° C., about 45° C. to about 55° C., about 55° C. to about 70° C., about 70° C. to about 75° C., about 75° C. to about 85° C., about 85° C. to about 90° C., about 90° C. to about 95° C., about 95° C. to about 100° C., about 100° C. to about 105° C., about 105° C. to about 110° C., about 110° C. to about 120° C., or 95° C., 96° C., 97° C., 98° C., 99° C., 100° C., 101° C., 102° C., 103° C., 104° C., 105° C., 106° C., 107° C., 108° C., 109° C., 110° C., 111° C., 112° C., 113° C., 114° C., 115° C. or more. In some embodiments, the thermostable polypeptides according to the invention retain a lignocellulosic enzyme activity, at a temperature in the ranges described above, at about pH 3.0, about pH 3.5, about pH 4.0, about pH 4.5, about pH 5.0, about pH 5.5, about pH 6.0, about pH 6.5, about pH 7.0, about pH 7.5, about pH 8.0, about pH 8.5, about pH 9.0, about pH 9.5, about pH 10.0, about pH 10.5, about pH 11.0, about pH 11.5, about pH 12.0 or more.

[0049] In another aspect, the lignocellulosic enzyme activity can be thermotolerant. The polypeptide can retain a lignocellulosic enzyme activity after exposure to a temperature in the range from about −100° C. to about −80° C., about −80° C. to about −40° C., about −40° C. to about −20° C., about −20° C. to about 0° C., about 0° C. to about 5° C., about 5° C. to about 15° C., about 15° C. to about 25° C., about 25° C. to about 37° C., about 37° C. to about 45° C., about 45° C. to about 55° C., about 55° C. to about 70° C., about 70° C. to about 75° C., about 75° C. to about 85° C., about 85° C. to about 90° C., about 90° C. to about 95° C., about 95° C. to about 100° C., about 100° C. to about 105° C., about 105° C. to about 110° C., about 110° C. to about 120° C., or 95° C., 96° C., 97° C., 98° C., 99° C., 100° C., 101 ° C., 102° C., 103° C., 104° C., 105° C., 106° C., 107° C., 108° C., 109° C., 110° C., 111° C., 112° C., 113° C., 114° C., 115° C. or more. In some embodiments, the thermotolerant polypeptides according to the invention retain a lignocellulosic enzyme activity, after exposure to a temperature in the ranges described above, at about pH 3.0, about pH 3.5, about pH 4.0, about pH 4.5, about pH 5.0, about pH 5.5, about pH 6.0, about pH 6.5, about pH 7.0, about pH 7.5, about pH 8.0, about pH 8.5, about pH 9.0, about pH 9.5, about pH 10.0, about pH 10.5, about pH 11.0, about pH 11.5, about pH 12.0 or more.

[0050] Another aspect of the invention provides an isolated, synthetic or recombinant polypeptide or peptide comprising at least 10, 15, 20, 25, 30, 35, 40, 45, 50, 55, 60, 65, 70, 75, 80, 85, 90, 95, 100, 125, 150 or more consecutive bases of a polypeptide or peptide sequence of the invention, sequences substantially identical thereto, and the sequences complementary thereto. The peptide can be, e.g., an immunogenic fragment, a motif (e.g., a binding site), a signal sequence, a prepro sequence or an active site.

[0051] The invention provides isolated, synthetic or recombinant nucleic acids comprising a sequence encoding a polypeptide having a lignocellulosic activity, e.g., a glycosyl hydrolase, cellulase, endoglucanase, β-glucosidase(beta-glucosidase), mannanase, xylanase, xylosidase (e.g., β-xylosidase) and/or arabinofuranosidase enzyme activity and a signal sequence, wherein the nucleic acid comprises a sequence of the invention. The signal sequence can be derived from another the lignocellulosic enzyme, and/or glucose oxidase enzyme or a non-cellulase, e.g., non-endoglucanase, non-cellobiohydrolase, non-β-glucosidase (non-beta-glucosidase), non-xylanase, non-mannanase, non-β-xylosidase, non-arabinofuranosidase, and/or non-glucose oxidase (i.e., a heterologous) enzyme. The invention provides isolated, synthetic or recombinant nucleic acids comprising a sequence encoding a polypeptide having a lignocellulosic activity, and/or glucose oxidase enzyme activity, wherein the sequence does not contain a signal sequence and the nucleic acid comprises a sequence of the invention. In one aspect, the invention provides an isolated, synthetic or recombinant polypeptide comprising a polypeptide of the invention lacking all or part of a signal sequence. In one aspect, the isolated, synthetic or recombinant polypeptide can comprise the polypeptide of the invention comprising a heterologous signal sequence, such as a heterologous the lignocellulosic enzyme, e.g., glycosyl hydrolase, cellulase, endoglucanase, cellobiohydrolase, β-glucosidase(beta-glucosidase), xylanase, mannanse, β-xylosidase and/or arabinofuranosidase; and/or glucose oxidase, enzyme signal sequence or non-cellulase, e.g., non-endoglucanase, non-cellobiohydrolase, non-β-glucosidase (non-beta-glucosidase), non-xylanase, non-mannanse, non-β-xylosidase, non-arabinofuranosidase signal sequence.

[0052] In one aspect, the invention provides chimeric (e.g., multidomain recombinant) proteins comprising a first domain comprising a signal sequence and/or a carbohydrate binding domain (CBM) of the invention and at least a second domain. The protein can be a fusion protein. The second domain can comprise an enzyme. The protein can be a non-enzyme, e.g., the chimeric protein can comprise a signal sequence and/or a CBM of the invention and a structural protein.

[0053] The invention provides chimeric polypeptides comprising (i) at least a first domain comprising (or consisting of) a carbohydrate binding domain (CBM), a signal peptide (SP), a prepro sequence and/or a catalytic domain (CD) of the invention; and, (ii) at least a second domain comprising a heterologous polypeptide or peptide, wherein the heterologous polypeptide or peptide is not naturally associated with the CBM, signal peptide (SP), prepro sequence and/ or catalytic domain (CD). In one aspect, the heterologous polypeptide or peptide is not a lignocellulosic enzyme, e.g., a glycosyl hydrolase, cellulase, endoglucanase, cellobiohydrolase, β-glucosidase(beta-glucosidase), xylanase, mannanse, xylosidase (e.g., β-xylosidase) and/or arabinofuranosidase enzyme. The heterologous polypeptide or peptide can be amino terminal to, carboxy terminal to or on both ends of the CBM, signal peptide (SP), prepro sequence and/or catalytic domain (CD).

[0054] The invention provides isolated, synthetic or recombinant nucleic acids encoding a chimeric polypeptide, wherein the chimeric polypeptide comprises at least a first domain comprising, or consisting of, a CBM, a signal peptide (SP), a prepro domain and/or a catalytic domain (CD) of the invention; and, at least a second domain comprising a heterologous polypeptide or peptide, wherein the heterologous polypeptide or peptide is not naturally associated with the CBM, signal peptide (SP), prepro domain and/ or catalytic domain (CD).

[0055] The invention provides isolated, synthetic or recombinant signal sequences (e.g., signal peptides) consisting of or comprising the sequence of (a sequence as set forth in) residues 1 to 14, 1 to 15, 1 to 16, 1 to 17, 1 to 18, 1 to 19, 1 to 20, 1 to 21, 1 to 22, 1 to 23, 1 to 24, 1 to 25, 1 to 26, 1 to 27, 1 to 28, 1 to 28, 1 to 30, 1 to 31, 1 to 32, 1 to 33, 1 to 34, 1 to 35, 1 to 36, 1 to 37, 1 to 38, 1 to 40, 1 to 41, 1 to 42, 1 to 43, 1 to 44, 1 to 45, 1 to 46 or 1 to 47, of a polypeptide of the invention, e.g., the exemplary polypeptides of the invention, e.g., SEQ ID NO:2, SEQ ID NO:4, etc., to SEQ ID NO:472 SEQ ID NO:473, SEQ ID NO:474, SEQ ID NO:475, SEQ ID NO:476, SEQ ID NO:477, SEQ ID NO:478, SEQ ID NO:479, all the even numbered SEQ ID NOs: between SEQ ID NO:490 and SEQ ID NO:700, SEQ ID NO:719 and/or SEQ ID NO:721, (see Tables 1 to 4, and the sequence listing). In one aspect, the invention provides signal sequences comprising the first 14, 15, 16, 17, 18, 19, 20, 21, 22, 23, 24, 25, 26, 27, 28, 29, 30, 31, 32, 33, 34, 35, 36, 37, 38, 39, 40, 41, 42, 43, 44, 45, 46, 47, 48, 49, 50, 51, 52, 53, 54, 55, 56, 57, 58, 59, 60, 61, 62, 63, 64, 65, 66, 67, 68, 69, 70 or more amino terminal residues of a polypeptide of the invention.

[0056] In one aspect, the lignocellulosic enzyme, e.g., glycosyl hydrolase, cellulase, endoglucanase, cellobiohydrolase, β-glucosidase(beta-glucosidase), xylanase, mannanse, β-xylosidase and/or arabinofuranosidase enzyme activity comprises a specific activity at about 37° C. in the range from about 1 to about 1200 units per milligram of protein, or, about 100 to about 1000 units per milligram of protein. In another aspect, the lignocellulosic enzyme activity comprises a specific activity from about 100 to about 1000 units per milligram of protein, or, from about 500 to about 750 units per milligram of protein. Alternatively, the lignocellulosic enzyme activity comprises a specific activity at 37° C. in the range from about 1 to about 750 units per milligram of protein, or, from about 500 to about 1200 units per milligram of protein. In one aspect, the lignocellulosic enzyme activity comprises a specific activity at 37° C. in the range from about 1 to about 500 units per milligram of protein, or, from about 750 to about 1000 units per milligram of protein. In another aspect, the lignocellulosic enzyme activity comprises a specific activity at 37° C. in the range from about 1 to about 250 units per milligram of protein. Alternatively, the lignocellulosic enzyme activity comprises a specific activity at 37° C. in the range from about 1 to about 100 units per milligram of protein.

[0057] In another aspect, the thermotolerance comprises retention of at least half of the specific activity of the lignocellulosic enzyme, e.g., glycosyl hydrolase, cellulase, endoglucanase, cellobiohydrolase, β-glucosidase(beta-glucosidase), xylanase, mannanse, β-xylosidase and/or arabinofuranosidase enzyme at 37° C. after being heated to the elevated temperature. Alternatively, the thermotolerance can comprise retention of specific activity at 37° C. in the range from about 1 to about 1200 units per milligram of protein, or, from about 500 to about 1000 units per milligram of protein, after being heated to the elevated temperature. In another aspect, the thermotolerance can comprise retention of specific activity at 37° C. in the range from about 1 to about 500 units per milligram of protein after being heated to the elevated temperature.

[0058] The invention provides the isolated, synthetic or recombinant polypeptide of the invention, wherein the polypeptide comprises at least one glycosylation site. In one aspect, glycosylation can be an N-linked glycosylation. In one aspect, the polypeptide can be glycosylated after being expressed in a P. pastoris or a S. pombe.

[0059] In one aspect, the polypeptide can retain the lignocellulosic enzyme, e.g., glycosyl hydrolase, cellulase, endoglucanase, cellobiohydrolase, β-glucosidase(beta-glucosidase), xylanase, mannanse, β-xylosidase and/or arabinofuranosidase activity under conditions comprising about pH 6.5, pH 6, pH 5.5, pH 5, pH 4.5 or pH 4 or more acidic. In another aspect, the polypeptide can retain the lignocellulosic enzyme activity under conditions comprising about pH 7, pH 7.5 pH 8.0, pH 8.5, pH 9, pH 9.5, pH 10, pH 10.5 or pH 11 or more basic pH. In one aspect, the polypeptide can retain the lignocellulosic enzyme activity after exposure to conditions comprising about pH 6.5, pH 6, pH 5.5, pH 5, pH 4.5 or pH 4 or more acidic pH. In another aspect, the polypeptide can retain the lignocellulosic enzyme activity after exposure to conditions comprising about pH 7, pH 7.5 pH 8.0, pH 8.5, pH 9, pH 9.5, pH 10, pH 10.5 or pH 11 or more basic pH.

[0060] In one aspect, the lignocellulosic enzyme, e.g., glycosyl hydrolase, cellulase, endoglucanase, cellobiohydrolase, β-glucosidase(beta-glucosidase), xylanase, mannanse, β-xylosidase and/or arabinofuranosidase enzyme of the invention has activity at under alkaline conditions, e.g., the alkaline conditions of the gut, e.g., the small intestine. In one aspect, the polypeptide can retains activity after exposure to the acidic pH of the stomach.

[0061] The invention provides protein preparations comprising a polypeptide (including peptides) of the invention, wherein the protein preparation comprises a liquid, a solid or a gel. The invention provides heterodimers comprising a polypeptide of the invention and a second protein or domain. The second member of the heterodimer can be a different the lignocellulosic enzyme, e.g., glycosyl hydrolase, cellulase, endoglucanase, cellobiohydrolase, β-glucosidase(beta-glucosidase), xylanase, mannanse, β-xylosidase and/or arabinofuranosidase enzyme, a different enzyme or another protein. In one aspect, the second domain can be a polypeptide and the heterodimer can be a fusion protein. In one aspect, the second domain can be an epitope or a tag. In one aspect, the invention provides homodimers comprising a polypeptide of the invention.

[0062] The invention provides immobilized polypeptides (including peptides) having the lignocellulosic enzyme, e.g., glycosyl hydrolase, cellulase, endoglucanase, cellobiohydrolase, β-glucosidase(beta-glucosidase), xylanase, mannanse, β-xylosidase and/or arabinofuranosidase enzyme activity, wherein the immobilized polypeptide comprises a polypeptide of the invention, a polypeptide encoded by a nucleic acid of the invention, or a polypeptide comprising a polypeptide of the invention and a second domain. In one aspect, the polypeptide can be immobilized on a cell, a metal, a resin, a polymer, a ceramic, a glass, a microelectrode, a graphitic particle, a bead, a gel, a plate, an array or a capillary tube.

[0063] The invention also provides arrays comprising an immobilized nucleic acid of the invention, including, e.g., probes of the invention. The invention also provides arrays comprising an antibody of the invention.

[0064] The invention provides isolated, synthetic or recombinant antibodies that specifically bind to a polypeptide of the invention or to a polypeptide encoded by a nucleic acid of the invention.

[0065] These antibodies of the invention can be a monoclonal or a polyclonal antibody. The invention provides hybridomas comprising an antibody of the invention, e.g., an antibody that specifically binds to a polypeptide of the invention or to a polypeptide encoded by a nucleic acid of the invention. The invention provides nucleic acids encoding these antibodies.

[0066] The invention provides method of isolating or identifying a polypeptide having the lignocellulosic enzyme, e.g., glycosyl hydrolase, cellulase, endoglucanase, cellobiohydrolase, β-glucosidase(beta-glucosidase), xylanase, mannanse, β-xylosidase and/or arabinofuranosidase activity comprising the steps of: (a) providing an antibody of the invention; (b) providing a sample comprising polypeptides; and (c) contacting the sample of step (b) with the antibody of step (a) under conditions wherein the antibody can specifically bind to the polypeptide, thereby isolating or identifying a polypeptide having the lignocellulosic enzyme activity.

[0067] The invention provides methods of making an anti-glucose oxidase, an anti-cellulase, e.g., anti-endoglucanase, anti-cellobiohydrolase, anti-β-glucosidase (anti-beta-glucosidase), anti-xylanase, anti-mannanse, anti-β-xylosidase or anti-arabinofuranosidase enzyme antibody comprising administering to a non-human animal a nucleic acid of the invention or a polypeptide of the invention or subsequences thereof in an amount sufficient to generate a humoral immune response, thereby making an anti-glucose oxidase or anti-cellulase, e.g., anti-endoglucanase, anti-cellobiohydrolase, anti-β-glucosidase (anti-beta-glucosidase), anti-xylanase, anti-mannanse, anti-β-xylosidase, and/or anti-arabinofuranosidase enzyme antibody. The invention provides methods of making an anti-glucose oxidase or anti-cellulase, e.g., anti-endoglucanase, anti-cellobiohydrolase, anti-β-glucosidase (anti-beta-glucosidase), anti-xylanase, anti-mannanse, anti-β-xylosidase, and/or anti-arabinofuranosidase immune response (cellular or humoral) comprising administering to a non-human animal a nucleic acid of the invention or a polypeptide of the invention or subsequences thereof in an amount sufficient to generate an immune response (cellular or humoral).

[0068] The invention provides methods of producing a recombinant polypeptide comprising the steps of: (a) providing a nucleic acid of the invention operably linked to a promoter; and (b) expressing the nucleic acid of step (a) under conditions that allow expression of the polypeptide, thereby producing a recombinant polypeptide. In one aspect, the method can further comprise transforming a host cell with the nucleic acid of step (a) followed by expressing the nucleic acid of step (a), thereby producing a recombinant polypeptide in a transformed cell.

[0069] The invention provides methods for identifying a polypeptide having the lignocellulosic enzyme, e.g., glycosyl hydrolase, cellulase, endoglucanase, cellobiohydrolase, β-glucosidase(beta-glucosidase), xylanase, mannanse, β-xylosidase and/or arabinofuranosidase enzyme activity comprising the following steps: (a) providing a polypeptide of the invention; or a polypeptide encoded by a nucleic acid of the invention; (b) providing the lignocellulosic enzyme substrate; and (c) contacting the polypeptide or a fragment or variant thereof of step (a) with the substrate of step (b) and detecting a decrease in the amount of substrate or an increase in the amount of a reaction product, wherein a decrease in the amount of the substrate or an increase in the amount of the reaction product detects a polypeptide having the lignocellulosic enzyme activity. In one aspect, the substrate is a cellulose-comprising or a polysaccharide-comprising (e.g., soluble cellooligsaccharide- and/or arabinoxylan oligomer-comprising) compound.

[0070] The invention provides methods for identifying a lignocellulosic enzyme, e.g., a glycosyl hydrolase, cellulase, endoglucanase, cellobiohydrolase, β-glucosidase(beta-glucosidase), xylanase, mannanse, β-xylosidase and/or arabinofuranosidase enzyme substrate comprising the following steps: (a) providing a polypeptide of the invention; or a polypeptide encoded by a nucleic acid of the invention; (b) providing a test substrate; and (c) contacting the polypeptide of step (a) with the test substrate of step (b) and detecting a decrease in the amount of substrate or an increase in the amount of reaction product, wherein a decrease in the amount of the substrate or an increase in the amount of a reaction product identifies the test substrate as a lignocellulosic enzyme substrate.

[0071] The invention provides methods of determining whether a test compound specifically binds to a polypeptide comprising the following steps: (a) expressing a nucleic acid or a vector comprising the nucleic acid under conditions permissive for translation of the nucleic acid to a polypeptide, wherein the nucleic acid comprises a nucleic acid of the invention, or, providing a polypeptide of the invention; (b) providing a test compound; (c) contacting the polypeptide with the test compound; and (d) determining whether the test compound of step (b) specifically binds to the polypeptide.

[0072] The invention provides methods for identifying a modulator of a lignocellulosic enzyme, e.g., a glycosyl hydrolase, cellulase, endoglucanase, cellobiohydrolase, β-glucosidase(beta-glucosidase), xylanase, mannanse, β-xylosidase and/or arabinofuranosidase enzyme activity comprising the following steps: (a) providing a polypeptide of the invention or a polypeptide encoded by a nucleic acid of the invention; (b) providing a test compound; (c) contacting the polypeptide of step (a) with the test compound of step (b) and measuring an activity of the lignocellulosic enzyme, wherein a change in the lignocellulosic enzyme activity measured in the presence of the test compound compared to the activity in the absence of the test compound provides a determination that the test compound modulates the lignocellulosic enzyme activity. In one aspect, the lignocellulosic enzyme activity can be measured by providing a lignocellulosic enzyme substrate and detecting a decrease in the amount of the substrate or an increase in the amount of a reaction product, or, an increase in the amount of the substrate or a decrease in the amount of a reaction product. A decrease in the amount of the substrate or an increase in the amount of the reaction product with the test compound as compared to the amount of substrate or reaction product without the test compound identifies the test compound as an activator of the lignocellulosic enzyme activity. An increase in the amount of the substrate or a decrease in the amount of the reaction product with the test compound as compared to the amount of substrate or reaction product without the test compound identifies the test compound as an inhibitor of the lignocellulosic enzyme activity.

[0073] The invention provides computer systems comprising a processor and a data storage device wherein said data storage device has stored thereon a polypeptide sequence or a nucleic acid sequence of the invention (e.g., a polypeptide or peptide encoded by a nucleic acid of the invention). In one aspect, the computer system can further comprise a sequence comparison algorithm and a data storage device having at least one reference sequence stored thereon. In another aspect, the sequence comparison algorithm comprises a computer program that indicates polymorphisms. In one aspect, the computer system can further comprise an identifier that identifies one or more features in said sequence. The invention provides computer readable media having stored thereon a polypeptide sequence or a nucleic acid sequence of the invention. The invention provides methods for identifying a feature in a sequence comprising the steps of: (a) reading the sequence using a computer program which identifies one or more features in a sequence, wherein the sequence comprises a polypeptide sequence or a nucleic acid sequence of the invention; and (b) identifying one or more features in the sequence with the computer program. The invention provides methods for comparing a first sequence to a second sequence comprising the steps of: (a) reading the first sequence and the second sequence through use of a computer program which compares sequences, wherein the first sequence comprises a polypeptide sequence or a nucleic acid sequence of the invention; and (b) determining differences between the first sequence and the second sequence with the computer program. The step of determining differences between the first sequence and the second sequence can further comprise the step of identifying polymorphisms. In one aspect, the method can further comprise an identifier that identifies one or more features in a sequence. In another aspect, the method can comprise reading the first sequence using a computer program and identifying one or more features in the sequence.

[0074] The invention provides methods for isolating or recovering a nucleic acid encoding a polypeptide having the lignocellulosic enzyme, e.g., glycosyl hydrolase, cellulase, endoglucanase, cellobiohydrolase, β-glucosidase(beta-glucosidase), xylanase, mannanse, β-xylosidase and/or arabinofuranosidase enzyme activity from a sample, e.g. an environmental sample, comprising the steps of: (a) providing an amplification primer sequence pair for amplifying a nucleic acid encoding a polypeptide having a lignocellulosic activity, wherein the primer pair is capable of amplifying a nucleic acid of the invention; (b) isolating a nucleic acid from the sample, e.g. environmental sample, or treating the sample, e.g. environmental sample, such that nucleic acid in the sample is accessible for hybridization to the amplification primer pair; and, (c) combining the nucleic acid of step (b) with the amplification primer pair of step (a) and amplifying nucleic acid from the sample, e.g. environmental sample, thereby isolating or recovering a nucleic acid encoding a polypeptide having a lignocellulosic activity from a sample, e.g. an environmental sample. One or each member of the amplification primer sequence pair can comprise an oligonucleotide comprising an amplification primer sequence pair of the invention, e.g., having at least about 10 to 50 consecutive bases of a sequence of the invention.

[0075] The invention provides methods for isolating or recovering a nucleic acid encoding a polypeptide having a lignocellulosic activity, e.g., a glycosyl hydrolase, cellulase, endoglucanase, β-glucosidase(beta-glucosidase), xylanase, mannanse, β-xylosidase and/or arabinofuranosidase enzyme activity from a sample, e.g. an environmental sample, comprising the steps of: (a) providing a polynucleotide probe comprising a nucleic acid of the invention or a subsequence thereof; (b) isolating a nucleic acid from the sample, e.g. environmental sample, or treating the sample, e.g. environmental sample, such that nucleic acid in the sample is accessible for hybridization to a polynucleotide probe of step (a); (c) combining the isolated nucleic acid or the treated sample, e.g. environmental sample, of step (b) with the polynucleotide probe of step (a); and (d) isolating a nucleic acid that specifically hybridizes with the polynucleotide probe of step (a), thereby isolating or recovering a nucleic acid encoding a polypeptide having a lignocellulosic activity from a sample, e.g. an environmental sample. The sample, e.g. environmental sample, can comprise a water sample, a liquid sample, a soil sample, an air sample or a biological sample. In one aspect, the biological sample can be derived from a bacterial cell, a protozoan cell, an insect cell, a yeast cell, a plant cell, a fungal cell or a mammalian cell.

[0076] The invention provides methods of generating a variant of a nucleic acid encoding a polypeptide having a lignocellulosic activity, e.g., a glycosyl hydrolase, cellulase, endoglucanase, β-glucosidase(beta-glucosidase), xylanase, mannanse, β-xylosidase and/or arabinofuranosidase enzyme activity comprising the steps of: (a) providing a template nucleic acid comprising a nucleic acid of the invention; and (b) modifying, deleting or adding one or more nucleotides in the template sequence, or a combination thereof, to generate a variant of the template nucleic acid. In one to aspect, the method can further comprise expressing the variant nucleic acid to generate a variant the lignocellulosic enzyme polypeptide. The modifications, additions or deletions can be introduced by a method comprising error-prone PCR, shuffling, oligonucleotide-directed mutagenesis, assembly PCR, sexual PCR mutagenesis, in vivo mutagenesis, cassette mutagenesis, recursive ensemble mutagenesis, exponential ensemble mutagenesis, site-specific mutagenesis, gene reassembly, GENE SITE SATURATION MUTAGENESIS (or GSSM), synthetic ligation reassembly (SLR), Chromosomal Saturation Mutagenesis (CSM) or a combination thereof. In another aspect, the modifications, additions or deletions are introduced by a method comprising recombination, recursive sequence recombination, phosphothioate-modified DNA mutagenesis, uracil-containing template mutagenesis, gapped duplex mutagenesis, point mismatch repair mutagenesis, repair-deficient host strain mutagenesis, chemical mutagenesis, radiogenic mutagenesis, deletion mutagenesis, restriction-selection mutagenesis, restriction-purification mutagenesis, artificial gene synthesis, ensemble mutagenesis, chimeric nucleic acid multimer creation and a combination thereof.

[0077] In one aspect, the method can be iteratively repeated until a lignocellulosic enzyme, e.g., a glycosyl hydrolase, cellulase, endoglucanase, cellobiohydrolase, β-glucosidase(beta-glucosidase), xylanase, mannanse, β-xylosidase and/or arabinofuranosidase enzyme having an altered or different activity or an altered or different stability from that of a polypeptide encoded by the template nucleic acid is produced. In one aspect, the variant the lignocellulosic enzyme polypeptide is thermotolerant, and retains some activity after being exposed to an elevated temperature. In another aspect, the variant the lignocellulosic enzyme polypeptide has increased glycosylation as compared to the lignocellulosic enzyme encoded by a template nucleic acid. Alternatively, the variant the polypeptide has a lignocellulosic enzyme activity under a high temperature, wherein the lignocellulosic enzyme encoded by the template nucleic acid is not active under the high temperature. In one aspect, the method can be iteratively repeated until a lignocellulosic enzyme, e.g., a glycosyl hydrolase, cellulase, endoglucanase, cellobiohydrolase, beta-glucosidase, xylanase, mannanse, β-xylosidase and/or arabinofuranosidase enzyme coding sequence having an altered codon usage from that of the template nucleic acid is produced. In another aspect, the method can be iteratively repeated until a lignocellulosic enzyme gene having higher or lower level of message expression or stability from that of the template nucleic acid is produced.

[0078] The invention provides methods for modifying codons in a nucleic acid encoding a polypeptide having a lignocellulosic activity, e.g., a glycosyl hydrolase, cellulase, endoglucanase, beta-glucosidase, xylanase, mannanse, β-xylosidase and/or arabinofuranosidase enzyme activity to increase its expression in a host cell, the method comprising the following steps: (a) providing a nucleic acid of the invention encoding a polypeptide having a lignocellulosic enzyme activity; and, (b) identifying a non-preferred or a less preferred codon in the nucleic acid of step (a) and replacing it with a preferred or neutrally used codon encoding the same amino acid as the replaced codon, wherein a preferred codon is a codon over-represented in coding sequences in genes in the host cell and a non-preferred or less preferred codon is a codon under-represented in coding sequences in genes in the host cell, thereby modifying the nucleic acid to increase its expression in a host cell.

[0079] The invention provides methods for modifying codons in a nucleic acid encoding a polypeptide having a lignocellulosic activity, e.g., a glycosyl hydrolase, cellulase, endoglucanase, beta-glucosidase, xylanase, mannanse, β-xylosidase and/or arabinofuranosidase enzyme activity; the method comprising the following steps: (a) providing a nucleic acid of the invention; and, (b) identifying a codon in the nucleic acid of step (a) and replacing it with a different codon encoding the same amino acid as the replaced codon, thereby modifying codons in a nucleic acid encoding a lignocellulosic enzyme.

[0080] The invention provides methods for modifying codons in a nucleic acid encoding a polypeptide having a lignocellulosic activity, e.g., a glycosyl hydrolase, cellulase, endoglucanase, beta-glucosidase, xylanase, mannanse, β-xylosidase and/or arabinofuranosidase enzyme activity to increase its expression in a host cell, the method comprising the following steps: (a) providing a nucleic acid of the invention encoding a lignocellulosic enzyme polypeptide; and, (b) identifying a non-preferred or a less preferred codon in the nucleic acid of step (a) and replacing it with a preferred or neutrally used codon encoding the same amino acid as the replaced codon, wherein a preferred codon is a codon over-represented in coding sequences in genes in the host cell and a non-preferred or less preferred codon is a codon under-represented in coding sequences in genes in the host cell, thereby modifying the nucleic acid to increase its expression in a host cell.

[0081] The invention provides methods for modifying a codon in a nucleic acid encoding a polypeptide having a lignocellulosic activity, e.g., a glycosyl hydrolase, cellulase, endoglucanase, beta-glucosidase, xylanase, mannanse, β-xylosidase and/or arabinofuranosidase enzyme activity to decrease its expression in a host cell, the method comprising the following steps: (a) providing a nucleic acid of the invention; and (b) identifying at least one preferred codon in the nucleic acid of step (a) and replacing it with a non-preferred or less preferred codon encoding the same amino acid as the replaced codon, wherein a preferred codon is a codon over-represented in coding sequences in genes in a host cell and a non-preferred or less preferred codon is a codon under-represented in coding sequences in genes in the host cell, thereby modifying the nucleic acid to decrease its expression in a host cell. In one aspect, the host cell can be a bacterial cell, a fungal cell, an insect cell, a yeast cell, a plant cell or a mammalian cell.

[0082] The invention provides methods for producing a library of nucleic acids encoding a plurality of modified the lignocellulosic enzyme, e.g., glycosyl hydrolase, cellulase, endoglucanase, cellobiohydrolase, beta-glucosidase, xylanase, mannanse, β-xylosidase and/or arabinofuranosidase enzyme active sites or substrate binding sites, wherein the modified active sites or substrate binding sites are derived from a first nucleic acid comprising a sequence encoding a first active site or a first substrate binding site the method comprising the following steps: (a) providing a first nucleic acid encoding a first active site or first substrate binding site, wherein the first nucleic acid sequence comprises a sequence that hybridizes under stringent conditions to a nucleic acid of the invention, and the nucleic acid encodes a lignocellulosic enzyme active site or a lignocellulosic enzyme substrate binding site; (b) providing a set of mutagenic oligonucleotides that encode naturally-occurring amino acid variants at a plurality of targeted codons in the first nucleic acid; and, (c) using the set of mutagenic oligonucleotides to generate a set of active site-encoding or substrate binding site-encoding variant nucleic acids encoding a range of amino acid variations at each amino acid codon that was mutagenized, thereby producing a library of nucleic acids encoding a plurality of modified the lignocellulosic enzyme active sites or substrate binding sites. In one aspect, the method comprises mutagenizing the first nucleic acid of step (a) by a method comprising an optimized directed evolution system, GENE SITE SATURATION MUTAGENESIS™ (or GSSM), synthetic ligation reassembly (SLR), error-prone PCR, shuffling, oligonucleotide-directed mutagenesis, assembly PCR, sexual PCR mutagenesis, in vivo mutagenesis, cassette mutagenesis, recursive ensemble mutagenesis, exponential ensemble mutagenesis, site-specific mutagenesis, gene reassembly, and a combination thereof. In another aspect, the method comprises mutagenizing the first nucleic acid of step (a) or variants by a method comprising recombination, recursive sequence recombination, phosphothioate-modified DNA mutagenesis, uracil-containing template mutagenesis, gapped duplex mutagenesis, point mismatch repair mutagenesis, repair-deficient host strain mutagenesis, chemical mutagenesis, radiogenic mutagenesis, deletion mutagenesis, restriction-selection mutagenesis, restriction-purification mutagenesis, artificial gene synthesis, ensemble mutagenesis, chimeric nucleic acid multimer creation and a combination thereof.

[0083] The invention provides methods for making a small molecule comprising the following steps: (a) providing a plurality of biosynthetic enzymes capable of synthesizing or modifying a small molecule, wherein one of the enzymes comprises a lignocellulosic enzyme, e.g., a glycosyl hydrolase, cellulase, endoglucanase, cellobiohydrolase, beta-glucosidase, xylanase, mannanse, β-xylosidase and/or arabinofuranosidase enzyme encoded by a nucleic acid of the invention; (b) providing a substrate for at least one of the enzymes of step (a); and (c) reacting the substrate of step (b) with the enzymes under conditions that facilitate a plurality of biocatalytic reactions to generate a small molecule by a series of biocatalytic reactions. The invention provides methods for modifying a small molecule comprising the following steps: (a) providing a lignocellulosic enzyme, wherein the enzyme comprises a polypeptide of the invention, or, a polypeptide encoded by a nucleic acid of the invention, or a subsequence thereof; (b) providing a small molecule; and (c) reacting the enzyme of step (a) with the small molecule of step (b) under conditions that facilitate an enzymatic reaction catalyzed by the lignocellulosic enzyme, thereby modifying a small molecule by a lignocellulosic enzymatic reaction. In one aspect, the method can comprise a plurality of small molecule substrates for the enzyme of step (a), thereby generating a library of modified small molecules produced by at least one enzymatic reaction catalyzed by the lignocellulosic enzyme. In one aspect, the method can comprise a plurality of additional enzymes under conditions that facilitate a plurality of biocatalytic reactions by the enzymes to form a library of modified small molecules produced by the plurality of enzymatic reactions. In another aspect, the method can further comprise the step of testing the library to determine if a particular modified small molecule that exhibits a desired activity is present within the library. The step of testing the library can further comprise the steps of systematically eliminating all but one of the biocatalytic reactions used to produce a portion of the plurality of the modified small molecules within the library by testing the portion of the modified small molecule for the presence or absence of the particular modified small molecule with a desired activity, and identifying at least one specific biocatalytic reaction that produces the particular modified small molecule of desired activity.

[0084] The invention provides methods for determining a functional fragment of an enzyme of the invention comprising the steps of: (a) providing a polypeptide of the invention, or a polypeptide encoded by a nucleic acid of the invention, or a subsequence thereof; and (b) deleting a plurality of amino acid residues from the sequence of step (a) and testing the remaining subsequence for lignocellulosic enzyme activity, thereby determining a functional fragment of the enzyme. In one aspect, lignocellulosic enzyme activity, is measured by providing a substrate and detecting a decrease in the amount of the substrate or an increase in the amount of a reaction product.

[0085] The invention provides methods for whole cell engineering of new or modified phenotypes by using real-time metabolic flux analysis, the method comprising the following steps: (a) making a modified cell by modifying the genetic composition of a cell, wherein the genetic composition is modified by addition to the cell of a nucleic acid of the invention; (b) culturing the modified cell to generate a plurality of modified cells; (c) measuring at least one metabolic parameter of the cell by monitoring the cell culture of step (b) in real time; and, (d) analyzing the data of step (c) to determine if the measured parameter differs from a comparable measurement in an unmodified cell under similar conditions, thereby identifying an engineered phenotype in the cell using real-time metabolic flux analysis. In one aspect, the genetic composition of the cell can be modified by a method comprising deletion of a sequence or modification of a sequence in the cell, or, knocking out the expression of a gene. In one aspect, the method can further comprise selecting a cell comprising a newly engineered phenotype. In another aspect, the method can comprise culturing the selected cell, thereby generating a new cell strain comprising a newly engineered phenotype.

[0086] The invention provides methods of increasing thermotolerance or thermostability of a lignocellulosic enzyme, the method comprising glycosylating a lignocellulosic enzyme polypeptide, wherein the polypeptide comprises at least thirty contiguous amino acids of a polypeptide of the invention; or a polypeptide encoded by a nucleic acid sequence of the invention, thereby increasing the thermotolerance or thermostability of the lignocellulosic enzyme polypeptide. In one aspect, the lignocellulosic enzyme specific activity can be thermostable or thermotolerant at a temperature in the range from greater than about 37° C. to about 95° C.

[0087] The invention provides methods for overexpressing a recombinant glucose oxidase and/or the lignocellulosic enzyme polypeptide in a cell comprising expressing a vector comprising a nucleic acid comprising a nucleic acid of the invention or a nucleic acid sequence of the invention, wherein the sequence identities are determined by analysis with a sequence comparison algorithm or by visual inspection, wherein overexpression is effected by use of a high activity promoter, a dicistronic vector or by gene amplification of the vector.

[0088] The invention provides methods of making a transgenic plant comprising the following steps: (a) introducing a heterologous nucleic acid sequence into the cell, wherein the heterologous nucleic sequence comprises a nucleic acid sequence of the invention, thereby producing a transformed plant cell; and (b) producing a transgenic plant from the transformed cell. In one aspect, the step (a) can further comprise introducing the heterologous nucleic acid sequence by electroporation or microinjection of plant cell protoplasts. In another aspect, the step (a) can further comprise introducing the heterologous nucleic acid sequence directly to plant tissue by DNA particle bombardment. Alternatively, the step (a) can further comprise introducing the heterologous nucleic acid sequence into the plant cell DNA using an Agrobacterium tumefaciens host. In one aspect, the plant cell can be a cane sugar, beet, soybean, tomato, potato, corn, rice, wheat, tobacco or barley cell. The cell can be derived from a monocot or a dicot, or a monocot corn, sugarcane, rice, wheat, barley, switchgrass or Miscanthus; or a dicot oilseed crop, soy, canola, rapeseed, flax, cotton, palm oil, sugar beet, peanut, tree, poplar or lupine.

[0089] The invention provides methods of expressing a heterologous nucleic acid sequence in a plant cell comprising the following steps: (a) transforming the plant cell with a heterologous nucleic acid sequence operably linked to a promoter, wherein the heterologous nucleic sequence comprises a nucleic acid of the invention; (b) growing the plant under conditions wherein the heterologous nucleic acids sequence is expressed in the plant cell. The invention provides methods of expressing a heterologous nucleic acid sequence in a plant cell comprising the following steps: (a) transforming the plant cell with a heterologous nucleic acid sequence operably linked to a promoter, wherein the heterologous nucleic sequence comprises a sequence of the invention; (b) growing the plant under conditions wherein the heterologous nucleic acids sequence is expressed in the plant cell. In one aspect, the promoter is or comprises: a viral, bacterial, mammalian or plant promoter; or, a plant promoter; or, a potato, rice, corn, wheat, tobacco or barley promoter; or, a constitutive promoter or a CaMV35S promoter; or, an inducible promoter; or, a tissue-specific promoter or an environmentally regulated or a developmentally regulated promoter; or, a seed-specific, a leaf-specific, a root-specific, a stem-specific or an abscission-induced promoter; or, a seed preferred promoter, a maize gamma zein promoter or a maize ADP-gpp promoter. In one aspect, the plant cell is derived from is a monocot or dicot, or the plant is a monocot corn, sugarcane, rice, wheat, barley, switchgrass or Miscanthus; or the plant is a dicot oilseed crop, soy, canola, rapeseed, flax, cotton, palm oil, sugar beet, peanut, tree, poplar or lupine.

[0090] The invention provides methods for hydrolyzing, breaking up or disrupting a cellooligsaccharide, an arabinoxylan oligomer, or a glucan- or cellulose-comprising composition comprising the following steps: (a) providing a polypeptide of the invention; (b) providing a composition comprising a cellulose or a glucan; and (c) contacting the polypeptide of step (a) with the composition of step (b) under conditions wherein the cellulase hydrolyzes, breaks up or disrupts the cellooligsaccharide, arabinoxylan oligomer, or glucan- or cellulose-comprising composition; wherein optionally the composition comprises a plant cell, a bacterial cell, a yeast cell, an insect cell, or an animal cell. In one aspect, the polypeptide of the invention has a lignocellulosic activity, e.g., an activity comprising a glycosyl hydrolase, cellulase, endoglucanase, cellobiohydrolase, beta-glucosidase, xylanase, mannanse, β-xylosidase and/or arabinofuranosidase activity.

[0091] The invention provides feeds or foods comprising a polypeptide of the invention, or a polypeptide encoded by a nucleic acid of the invention. In one aspect, the invention provides a food, feed, a liquid, e.g., a beverage (such as a fruit juice or a beer), a bread or a dough or a bread product, or a beverage precursor (e.g., a wort), comprising a polypeptide of the invention. The invention provides food or nutritional supplements for an animal comprising a polypeptide of the invention, e.g., a polypeptide encoded by the nucleic acid of the invention. In one aspect, the polypeptide of the invention has a lignocellulosic activity, e.g., an activity comprising a glycosyl hydrolase, cellulase, endoglucanase, cellobiohydrolase, beta-glucosidase, xylanase, mannanse, β-xylosidase and/or arabinofuranosidase activity.

[0092] In one aspect, the polypeptide in the food or nutritional supplement can be glycosylated. The invention provides edible enzyme delivery matrices comprising a polypeptide of the invention, e.g., a polypeptide encoded by the nucleic acid of the invention. In one aspect, the delivery matrix comprises a pellet. In one aspect, the polypeptide can be glycosylated. In one aspect, the lignocellulosic enzyme, e.g., glycosyl hydrolase, cellulase, endoglucanase, cellobiohydrolase, beta-glucosidase, xylanase, mannanse, β-xylosidase and/or arabinofuranosidase enzyme activity is thermotolerant. In another aspect, the lignocellulosic enzyme activity is thermostable.

[0093] The invention provides a food, a feed or a nutritional supplement comprising a polypeptide of the invention. The invention provides methods for utilizing a lignocellulosic enzyme of the invention, e.g., a glycosyl hydrolase, cellulase, endoglucanase, cellobiohydrolase, beta-glucosidase, xylanase, mannanse, β-xylosidase and/or arabinofuranosidase enzyme, as a nutritional supplement in an animal or human diet, the method comprising: preparing a nutritional supplement containing a lignocellulosic enzyme of the invention comprising at least thirty contiguous amino acids of a polypeptide of the invention; and administering the nutritional supplement to an animal. The animal can be a human, a ruminant or a monogastric animal. The lignocellulosic enzyme can be prepared by expression of a polynucleotide encoding the lignocellulosic enzyme in a host organism, e.g., a bacterium, a yeast, a plant, an insect, a fungus and/or an animal. The organism also can be an S. pombe, S. cerevisiae, Pichia pastoris, E. coli, Streptomyces sp., Bacillus sp. and/or Lactobacillus sp. In one aspect, the plant is a monocot or dicot, or the plant is a monocot corn, sugarcane, rice, wheat, barley, switchgrass or Miscanthus; or the plant is a dicot oilseed crop, soy, canola, rapeseed, flax, cotton, palm oil, sugar beet, peanut, tree, poplar or lupine.

[0094] The invention provides edible enzyme delivery matrix comprising a thermostable recombinant of a lignocellulosic enzyme of the invention, e.g., a glycosyl hydrolase, cellulase, endoglucanase, cellobiohydrolase, beta-glucosidase, xylanase, mannanse, β-xylosidase and/or arabinofuranosidase enzyme of the invention. The invention provides methods for delivering a lignocellulosic enzyme supplement to an animal or human, the method comprising: preparing an edible enzyme delivery matrix in the form of pellets comprising a granulate edible carrier and a thermostable recombinant the lignocellulosic enzyme, wherein the pellets readily disperse the lignocellulosic enzyme contained therein into aqueous media, and administering the edible enzyme delivery matrix to the animal. The recombinant lignocellulosic enzyme of the invention can comprise all or a subsequence of at least one polypeptide of the invention. The lignocellulosic enzyme can be glycosylated to provide thermostability at pelletizing conditions. The delivery matrix can be formed by pelletizing a mixture comprising a grain germ and a lignocellulosic enzyme. The pelletizing conditions can include application of steam. The pelletizing conditions can comprise application of a temperature in excess of about 80° C. for about 5 minutes and the enzyme retains a specific activity of at least 350 to about 900 units per milligram of enzyme.

[0095] In one aspect, invention provides a pharmaceutical composition comprising a lignocellulosic enzyme of the invention, e.g., a glycosyl hydrolase, cellulase, endoglucanase, cellobiohydrolase, beta-glucosidase, xylanase, mannanse, β-xylosidase and/or arabinofuranosidase enzyme of the invention, or a polypeptide encoded by a nucleic acid of the invention. In one aspect, the pharmaceutical composition acts as a digestive aid.

[0096] In certain aspects, a cellulose-containing compound is contacted a polypeptide of the invention having a lignocellulosic enzyme of the invention at a pH in the range of between about pH 3.0 to 9.0, 10.0, 11.0 or more. In other aspects, a cellulose-containing compound is contacted with the lignocellulosic enzyme at a temperature of about 55° C., 60° C., 65° C., 70° C., 75° C., 80° C., 85° C., 90° C., or more.

[0097] The invention provides methods for delivering an enzyme supplement, e.g., a glycosyl hydrolase, cellulase, endoglucanase, cellobiohydrolase, beta-glucosidase, xylanase, mannanse, β-xylosidase and/or arabinofuranosidase supplement; and/or glucose oxidase supplement, to an animal or human, the method comprising: preparing an edible enzyme delivery matrix or pellets comprising a granulate edible carrier and a thermostable recombinant enzyme of the invention, wherein the pellets readily disperse the cellulase enzyme contained therein into aqueous media, and the recombinant enzyme of the invention, or a polypeptide encoded by a nucleic acid of the invention; and, administering the edible enzyme delivery matrix or pellet to the animal; and optionally the granulate edible carrier comprises a carrier selected from the group consisting of a grain germ, a grain germ that is spent of oil, a hay, an alfalfa, a timothy, a soy hull, a sunflower seed meal and a wheat midd, and optionally the edible carrier comprises grain germ that is spent of oil, and optionally the enzyme of the invention is glycosylated to provide thermostability at pelletizing conditions, and optionally the delivery matrix is formed by pelletizing a mixture comprising a grain germ and a cellulase, and optionally the pelletizing conditions include application of steam, and optionally the pelletizing conditions comprise application of a temperature in excess of about 80° C. for about 5 minutes and the enzyme retains a specific activity of at least 350 to about 900 units per milligram of enzyme.

[0098] The invention provides cellulose- or cellulose derivative-compositions comprising a polypeptide of the invention, or a polypeptide encoded by a nucleic acid of the invention, wherein in alternative embodiments the polypeptide has a glycosyl hydrolase, glucose oxidase, cellulase, endoglucanase, cellobiohydrolase, beta-glucosidase, xylanase, mannanse, β-xylosidase, and/or an arabinofuranosidase activity.

[0099] The invention provides wood, wood pulp or wood products, or wood waste, comprising an enzyme of the invention, or an enzyme encoded by a nucleic acid of the invention, wherein optionally the activity of the enzyme of the invention comprises endoglucanase, cellobiohydrolase, beta-glucosidase, xylanase, mannanse, β-xylosidase and/or arabinofuranosidase activity.

[0100] The invention provides paper, paper pulp or paper products, or paper waste byproducts or recycled material, comprising a polypeptide of the invention, or a polypeptide encoded by a nucleic acid of the invention, wherein optionally the polypeptide has glycosyl hydrolase, cellulase, endoglucanase, cellobiohydrolase, beta-glucosidase, xylanase, mannanse, β-xylosidase and/or arabinofuranosidase activity.

[0101] The invention provides methods for reducing the amount of cellulose in a paper, a wood or wood product comprising contacting the paper, wood or wood product, or wood waste, with an enzyme of the invention, or an enzyme encoded by a nucleic acid of the invention, wherein optionally the enzyme activity comprises a glycosyl hydrolase, endoglucanase, cellobiohydrolase, beta-glucosidase, xylanase, mannanse, β-xylosidase and/or arabinofuranosidase activity.

[0102] The invention provides detergent compositions comprising an enzyme of the invention, or an enzyme encoded by a nucleic acid of the invention, wherein optionally the polypeptide is formulated in a non-aqueous liquid composition, a cast solid, a granular form, a particulate form, a compressed tablet, a gel form, a paste or a slurry form. In one aspect, the activity comprises a glycosyl hydrolase, endoglucanase, cellobiohydrolase, beta-glucosidase, xylanase, mannanse, β-xylosidase and/or arabinofuranosidase activity.

[0103] The invention provides pharmaceutical compositions or dietary supplements comprising an enzyme of the invention, or a cellulase encoded by a nucleic acid of the invention, wherein optionally the enzyme is formulated as a tablet, gel, pill, implant, liquid, spray, powder, food, feed pellet or as an encapsulated formulation. In one aspect, the activity comprises a glycosyl hydrolase, endoglucanase, cellobiohydrolase, beta-glucosidase, xylanase, mannanse, β-xylosidase and/or arabinofuranosidase activity.

[0104] The invention provides fuels comprising a polypeptide of the invention, or a polypeptide encoded by a nucleic acid of the invention, wherein optionally the fuel is derived from a plant material, which optionally comprises potatoes, soybean (rapeseed), barley, rye, corn, oats, wheat, beets or sugar cane. The plant material can be derived from a monocot or a dicot, or a monocot corn, sugarcane, rice, wheat, barley, switchgrass or Miscanthus; or a dicot oilseed crop, soy, canola, rapeseed, flax, cotton, palm oil, sugar beet, peanut, tree, poplar or lupine. The fuel can comprise a bioalcohol, e.g., a bioethanol or a gasoline-ethanol mix, a biomethanol or a gasoline-methanol mix, a biobutanol or a gasoline-butanol mix, or a biopropanol or a gasoline-propanol mix. In one aspect, the activity comprises a glycosyl hydrolase, endoglucanase, cellobiohydrolase, beta-glucosidase, xylanase, mannanse, β-xylosidase and/or arabinofuranosidase activity.

[0105] The invention provides methods for making a fuel or alcohol comprising contacting an enzyme of the invention, or a composition comprising an enzyme of the invention, or a polypeptide encoded by a nucleic acid of the invention, or any one of the mixtures or “cocktails” or products of manufacture of the invention, with a biomass, e.g., a composition comprising a cellulose, a fermentable sugar or polysaccharide, such as a lignocellulosic material. In alternative embodiments, the composition comprising cellulose or a fermentable sugar comprises a plant, plant product, plant waste or plant derivative, and the plant, plant waste or plant product can comprise cane sugar plants or plant products, beets or sugarbeets, wheat, corn, soybeans, potato, rice or barley. In alternative embodiments, the fuel comprises a bioethanol or a gasoline-ethanol mix, a biomethanol or a gasoline-methanol mix, a biobutanol or a gasoline-butanol mix, or a biopropanol or a gasoline-propanol mix. The enzyme of the invention of the invention can be part of a plant or seed, e.g., a transgenic plant or seed—and in one aspect, the enzyme of the invention is expressed as a heterologous recombinant enzyme in the very biomass (e.g., plant, seed, plant waste) which is targeted for hydrolysis and conversion into a fuel or alcohol by this method of the invention. In one aspect, the activity comprises a glycosyl hydrolase, endoglucanase, cellobiohydrolase, beta-glucosidase, xylanase, mannanse, β-xylosidase and/or arabinofuranosidase activity.

[0106] The invention provides methods for making biofuel, e.g., comprising or consisting of a bioalcohol such as bioethanol, biomethanol, biobutanol or biopropanol, or a mixture thereof, comprising contacting a composition comprising an enzyme of the invention, or a fermentable sugar or lignocellulosic material comprising a polypeptide of the invention, or a polypeptide encoded by a nucleic acid of the invention, or any one of the mixtures or “cocktails” or products of manufacture of the invention, with a biomass, e.g., a composition comprising a cellulose, a fermentable sugar or polysaccharide, such as a lignocellulosic material. In alternative embodiments, the composition comprising the enzyme of the invention, and/or the material to be hydrolyzed, comprises a plant, plant waste, plant product or plant derivative. In alternative embodiments, the plant, plant waste or plant product comprises cane sugar plants or plant products (e.g., cane tops), beets or sugarbeets, wheat, corn, soybeans, potato, rice or barley. In one aspect, the plant is a monocot or dicot, or the plant is a monocot corn, sugarcane (including a cane part, e.g., cane tops), rice, wheat, barley, switchgrass or Miscanthus; or the plant is a dicot oilseed crop, soy, canola, rapeseed, flax, cotton, palm oil, sugar beet, peanut, tree, poplar or lupine. In one aspect, enzyme of the invention has an activity comprising a glycosyl hydrolase, endoglucanase, cellobiohydrolase, beta-glucosidase, xylanase, mannanse, β-xylosidase and/or arabinofuranosidase activity.

[0107] The invention provides enzyme ensembles, or “cocktail”, for depolymerization of cellulosic and hemicellulosic polymers to metabolizeable carbon moieties comprising a polypeptide of the invention, or a polypeptide encoded by a nucleic acid of the invention. In one aspect, enzyme of the invention has an activity comprising a glycosyl hydrolase, endoglucanase, cellobiohydrolase, beta-glucosidase, xylanase, mannanse, β-xylosidase and/or arabinofuranosidase activity. The enzyme ensembles, or “cocktails”, of the invention can be in the form of a composition (e.g., a formulation, liquid or solid), e.g., as a product of manufacture.

[0108] The invention provides compositions (including products of manufacture, enzyme ensembles, or “cocktails”) comprising (a) a mixture (or “cocktail”, “an enzyme ensemble”, a product of manufacture) of lignocellulosic enzymes, e.g., hemicellulose- and cellulose-hydrolyzing enzymes, including at least one enzyme of this invention, for example, the combinations of enzymes of the invention as set forth in Table 4, and discussed in Example 4, below; e.g., an exemplary mixture, “cocktail” or “enzyme ensemble” of the invention is: the exemplary enzymes SEQ ID NO:34, SEQ ID NO:360, SEQ ID NO:358, and SEQ ID NO:371; or, the exemplary enzymes SEQ ID NO:358, SEQ ID NO:360, SEQ ID NO:168; or, the exemplary enzymes SEQ ID NO:34, SEQ ID NO:360, SEQ ID NO:214; or, the exemplary enzymes SEQ ID NO:360, SEQ ID NO:90, SEQ ID NO:358; etc. as expressly set forth in Table 4.

[0109] The invention provides methods for processing a biomass material comprising lignocellulose comprising contacting a composition comprising a cellulose, a lignin, or a fermentable sugar with at least one polypeptide of the invention, or a polypeptide encoded by a nucleic acid of the invention, or an enzyme ensemble, product of manufacture or “cocktail” of the invention. In one aspect, the biomass material comprising lignocellulose is derived from an agricultural crop, is a byproduct of a food or a feed production, is a lignocellulosic waste product, or is a plant residue or a waste paper or waste paper product. In one aspect, enzyme of the invention has an activity comprising a glycosyl hydrolase, endoglucanase, cellobiohydrolase, beta-glucosidase, xylanase, mannanse, β-xylosidase and/or arabinofuranosidase activity. In one aspect, the plant residue comprise grain, seeds, stems, leaves, hulls, husks, corn or corn cobs, corn stover, hay, straw (e.g., a rice straw or a wheat straw, or any the dry stalk of any cereal plant) and/or grasses (e.g., Indian grass or switch grass). In one aspect, the grasses are Indian grass or switch grass, wood, wood chips, wood pulp and sawdust, or wood waste, and optionally the paper waste comprises discarded or used photocopy paper, computer printer paper, notebook paper, notepad paper, typewriter paper, newspapers, magazines, cardboard and paper-based packaging materials. In one aspect, the processing of the biomass material generates a biofuel, e.g., a bioalcohol such as bioethanol, biomethanol, biobutanol or biopropanol.

[0110] The invention provides dairy products comprising a polypeptide of the invention, or a polypeptide encoded by a nucleic acid of the invention, or an enzyme ensemble, product of manufacture or “cocktail” of the invention. In one aspect, the dairy product comprises a milk, an ice cream, a cheese or a yogurt. In one aspect, the polypeptide of the invention has a lignocellulosic activity, e.g., an activity comprising a glycosyl hydrolase, cellulase, endoglucanase, cellobiohydrolase, beta-glucosidase, xylanase, mannanse, β-xylosidase and/or arabinofuranosidase activity.

[0111] The invention provides method for improving texture and flavor of a dairy product comprising the following steps: (a) providing a polypeptide of the invention, or a polypeptide encoded by a nucleic acid of the invention, or an enzyme ensemble, product of manufacture or “cocktail” of the invention; (b) providing a dairy product; and (c) contacting the polypeptide of step (a) and the dairy product of step (b) under conditions wherein the polypeptide of the invention can improve the texture or flavor of the dairy product.

[0112] The invention provides textiles or fabrics comprising a polypeptide of the invention, or a polypeptide encoded by a nucleic acid of the invention, or an enzyme ensemble, product of manufacture or “cocktail” of the invention, wherein optionally the textile or fabric comprises a cellulose-containing fiber. In one aspect, the polypeptide of the invention has a lignocellulosic activity, e.g., an activity comprising a glycosyl hydrolase, and/or cellulase, endoglucanase, cellobiohydrolase, beta-glucosidase, xylanase, mannanse, β-xylosidase and/or arabinofuranosidase activity.

[0113] The invention provides methods for treating solid or liquid animal waste products comprising the following steps: (a) providing a polypeptide of the invention, or a polypeptide encoded by a nucleic acid of the invention, or an enzyme ensemble, product of manufacture or “cocktail” of the invention; (b) providing a solid or a liquid animal waste; and (c) contacting the polypeptide of step (a) and the solid or liquid waste of step (b) under conditions wherein the protease can treat the waste. In one aspect, the polypeptide of the invention has a lignocellulosic activity, e.g., an activity comprising a glycosyl hydrolase, cellulase, endoglucanase, cellobiohydrolase, beta-glucosidase, xylanase, mannanse, β-xylosidase and/or arabinofuranosidase activity.

[0114] The invention provides processed waste products comprising a polypeptide of the invention, or a polypeptide encoded by a nucleic acid of the invention, or an enzyme ensemble, product of manufacture or “cocktail” of the invention. In one aspect, the polypeptide of the invention has a lignocellulosic activity, e.g., an activity comprising a glycosyl hydrolase, cellulase, endoglucanase, cellobiohydrolase, beta-glucosidase, xylanase, mannanse, β-xylosidase and/or arabinofuranosidase activity.

[0115] The invention provides disinfectants comprising a polypeptide having glucose oxidase and/or cellulase activity, wherein the polypeptide comprises a sequence of the invention, or a polypeptide encoded by a nucleic acid of the invention, or an enzyme ensemble, product of manufacture or “cocktail” of the invention. In one aspect, the polypeptide of the invention has a lignocellulosic activity, e.g., an activity comprising a glycosyl hydrolase, cellulase, endoglucanase, cellobiohydrolase, beta-glucosidase, xylanase, mannanse, β-xylosidase and/or arabinofuranosidase activity.

[0116] The invention provides biodefense or bio-detoxifying agents comprising a polypeptide having a lignocellulosic activity, e.g., a cellulase activity, wherein the polypeptide comprises a sequence of the invention, or a polypeptide encoded by a nucleic acid of the invention, or an enzyme ensemble, product of manufacture or “cocktail” of the invention. In one aspect, the polypeptide of the invention has a lignocellulosic activity, e.g., an activity comprising a glycosyl hydrolase, cellulase, endoglucanase, cellobiohydrolase, beta-glucosidase, xylanase, mannanse, β-xylosidase and/or arabinofuranosidase activity.

[0117] The invention provides compositions (including enzyme ensembles and products of manufacture of the invention) comprising a mixture of enzymes of the invention, e.g., hemicellulose- and cellulose-hydrolyzing enzymes of the invention, and a biomass material, wherein optionally the biomass material comprises a lignocellulosic material derived from an agricultural crop, or the biomass material is a byproduct of a food or a feed production, or the biomass material is a lignocellulosic waste product, or the biomass material is a plant residue or a waste paper or waste paper product, or the biomass material comprises a plant residue, and optionally the plant residue comprises grains, seeds, stems, leaves, hulls, husks, corn or corn cobs, corn stover, grasses, wherein optionally grasses are Indian grass or switch grass, hay or straw (e.g., a rice straw or a wheat straw, or any the dry stalk of any cereal plant), wood, wood chips, wood pulp, wood waste, and/or sawdust, and optionally the paper waste comprises discarded or used photocopy paper, computer printer paper, notebook paper, notepad paper, typewriter paper, newspapers, magazines, cardboard and paper-based packaging materials. In one aspect, the polypeptide of the invention has a lignocellulosic activity, e.g., an activity comprising a glycosyl hydrolase, cellulase, endoglucanase, cellobiohydrolase, beta-glucosidase, xylanase, mannanse, β-xylosidase and/or arabinofuranosidase activity.

[0118] The invention provides methods for processing a biomass material comprising providing enzyme ensembles (“cocktails”) or products of manufacture of the invention, or a mixture of hemicellulose- and cellulose-hydrolyzing enzymes of the invention, wherein the cellulose-hydrolyzing enzymes comprise at least one endoglucanase, cellobiohydrolase I, cellobiohydrolase II and β-glucosidase; and the hemicellulose-hydrolyzing enzymes comprise at least one xylanase, β-xylosidase and arabinofuranosidase, and contacting the mixture of enzymes with the biomass material, wherein optionally the biomass material comprising lignocellulose is derived from an agricultural crop, is a byproduct of a food or a feed production, is a lignocellulosic waste product, or is a plant residue or a waste paper or waste paper product, and optionally the plant residue comprise grains, seeds, stems, leaves, hulls, husks, corn or corn cobs, corn stover, grasses, wherein optionally grasses are Indian grass or switch grass, hay or straw (e.g., a rice straw or a wheat straw, or any the dry stalk of any cereal plant), wood, wood waste, wood chips, wood pulp and/or sawdust, and optionally the paper waste comprises discarded or used photocopy paper, computer printer paper, notebook paper, notepad paper, typewriter paper, newspapers, magazines, cardboard and paper-based packaging materials, and optionally method further comprises processing the biomass material to generate a biofuel, e.g., a bioalcohol such as bioethanol, biomethanol, biobutanol or biopropanol, an alcohol and/or a sugar (a saccharide). In one aspect, the polypeptide of the invention has a lignocellulosic activity, e.g., an activity comprising a glycosyl hydrolase, cellulase, endoglucanase, cellobiohydrolase, beta-glucosidase, xylanase, mannanse,β-xylosidase and/or arabinofuranosidase activity.

[0119] The invention provides methods for processing a biomass material comprising providing a mixture of enzymes of the invention (including enzyme ensembles (“cocktails”) or products of manufacture of the invention), and contacting the enzyme mixture with the biomass material, wherein optionally the biomass material comprising lignocellulose is derived from an agricultural crop, is a byproduct of a food or a feed production, is a lignocellulosic waste product, or is a plant residue or a waste paper or waste paper product, and optionally the plant residue comprise seeds, stems, leaves, hulls, husks, corn or corn cobs, corn stover, corn fiber, grasses (e.g. Indian grass or switch grass), hay, grains, straw (e.g. rice straw or wheat straw or any the dry stalk of any cereal plant), sugarcane bagasse, sugar beet pulp, citrus pulp, and citrus peels, wood, wood thinnings, wood chips, wood pulp, pulp waste, wood waste, wood shavings and sawdust, construction and/or demolition wastes and debris (e.g. wood, wood shavings and sawdust), and optionally the paper waste comprises discarded or used photocopy paper, computer printer paper, notebook paper, notepad paper, typewriter paper, newspapers, magazines, cardboard and paper-based packaging materials, and recycled paper materials. In addition, urban wastes, e.g. the paper fraction of municipal solid waste, municipal wood waste, and municipal green waste, along with other materials containing sugar, starch, and/or cellulose can be used. Optionally the processing of the biomass material generates a biofuel, e.g., a bioalcohol such as bioethanol, biomethanol, biobutanol or biopropanol. In one aspect, the polypeptide of the invention has a lignocellulosic activity, e.g., an activity comprising a glycosyl hydrolase, cellulase, endoglucanase, cellobiohydrolase, beta-glucosidase, xylanase, mannanse, β-xylosidase and/or arabinofuranosidase activity.

[0120] The invention provides chimeric polypeptides comprising a first domain and at least a second domain, wherein the first domain comprises, or consists of, an enzyme of the invention, and the second domain comprises a heterologous sequence, e.g., a heterologous domain, such as a heterologous or modified carbohydrate binding domain or a heterologous or modified dockerin domain. In alternative embodiments, the carbohydrate binding domain or module (CBM) is a cellulose-binding module or a lignin-binding domain, and optionally the second domain appended approximate to the enzyme's catalytic domain. In one aspect, the CBM comprises, or consists of, a CBM of the invention. In alternative embodiments, the second domain comprises, or consists of, a heparin and/or fibronectin binding domain, such as a fibronectin type III domain, e.g., FN3, and the like.

[0121] In alternative embodiments, the second domain is appended approximate to the C-terminus of the enzyme's catalytic domain. In one aspect, the polypeptide of the invention has a lignocellulosic activity, e.g., an activity comprising a glycosyl hydrolase, cellulase, endoglucanase, cellobiohydrolase, beta-glucosidase, xylanase, mannanse, β-xylosidase and/or arabinofuranosidase activity.

[0122] The invention provides chimeric polypeptides comprising (a) a first domain and at least a second domain, wherein the first domain comprises, or consists of, an enzyme and/or a carbohydrate binding domain/ module (CBM) of the invention, and the second domain comprises, or consists of, a heterologous or modified carbohydrate binding domain (CBM), a heterologous or modified dockerin domain, a heterologous or modified prepro domain, or a heterologous or modified active site; (b) the chimeric polypeptide of (a), wherein the carbohydrate binding domain (CBM) comprises, or consists of, a cellulose-binding module or a lignin-binding domain; (c) the chimeric polypeptide of (a) or (b), wherein the CBM is approximate to the enzyme's catalytic domain; (d) the chimeric polypeptide of (a), (b) or (c), wherein the at least one CBM is positioned approximate to the polypeptide's catalytic domain; (e) the chimeric polypeptide of (d), wherein the at least one CBM is positioned: approximate to the C-terminus of the polypeptide's catalytic domain, or, approximate to the N-terminus of the polypeptide's catalytic domain, or both; (f) the chimeric polypeptide of any of (a), (b), (c) or (e), wherein the chimeric polypeptide comprises, or consists of, a recombinant chimeric protein.

[0123] The invention provides chimeric polypeptides comprising (a) a polypeptide of the invention having a lignocellulosic enzyme activity, and a domain comprising, or consisting of, at least one heterologous or modified carbohydrate binding domain-module (CBM) (e.g., a glycosyl hydrolase domain), or at least one internally rearranged CBM, or any combination thereof; (b) the chimeric polypeptide of (a), wherein the heterologous or modified or internally rearranged CBM comprises a CBM_{—}1, CBM_{—}2, CBM_{—}2a, CBM_{—}2b, CBM_{—}3, CBM_{—}3a, CBM_{—}3b, CBM_{—}3c, CBM_{—}4, CBM_{—}5, CBM_{—}5_{—}12, CBM_{—}6, CBM_{—}7, CBM_{—}8, CBM_{—}9, CBM_{—}10, CBM_{—}11, CBM_{—}12, CBM_{—}13, CBM_{—}14, CBM_{—}15, CBM_{—}16 or any of the CBMs from a CMB family of CBM_{—}1 to CBM_{—}48; a glycosyl hydrolase binding domain; a CBM of this invention (e.g., as described herein, CBMs of this invention also described in the Sequence Listing); or any combination thereof; (c) the chimeric polypeptide of (a) or (b), wherein the CBM comprises a cellulose-binding module or a lignin-binding domain; (d) the chimeric polypeptide of (a), (b) or (c), wherein the at least one CBM is positioned approximate to the polypeptide's catalytic domain; (e) the chimeric polypeptide of (d), wherein the at least one CBM is positioned: approximate to the C-terminus of the polypeptide's catalytic domain, or, approximate to the N-terminus of the polypeptide's catalytic domain, or both; or (f) the chimeric polypeptide of any of (a), (b), (c) or (e), wherein the chimeric polypeptide is a recombinant chimeric protein.

[0124] The invention provides isolated, synthetic and/or recombinant carbohydrate binding domain-modules (CBMs) comprising, or consisting of: (a) at least one CBM as set forth in Table 5, and the Sequence Listing; (b) at least one CBM as set forth in Table 6, and the Sequence Listing; or (c) a combination thereof. In alternative embodiments, carbohydrate binding domain-modules (CBMs) of the invention comprise, or consist of, any subsequence of any enzyme of this invention, including any subsequence of an exemplary enzyme of this invention, e.g., SEQ ID NO:2, SEQ ID NO:4, etc., wherein the subsequence comprises or consists of a CBM motif, e.g., a CBM_{—}1, CBM_{—}2, CBM_{—}2a, CBM_{—}2b, CBM_{—}3, CBM_{—}3a, CBM_{—}3b, CBM_{—}3c, CBM_{—}4, CBM_{—}5, CBM_{—}5_{—}12, CBM_{—}6, CBM_{—}7, CBM_{—}8, CBM_{—}9, CBM_{—}10, CBM_{—}11, CBM_{—}12, CBM_{—}13, CBM_{—}14, CBM_{—}15, CBM_{—}16 or any of the CBMs from a CMB family of CBM_{—}1 to CBM_{—}48.

[0125] The details of one or more aspects of the invention are set forth in the accompanying drawings and the description below. Other features, objects, and advantages of the invention will be apparent from the description and drawings, and from the claims.

[0126] All publications, patents, patent applications, GenBank sequences and ATCC deposits, cited herein are hereby expressly incorporated by reference for all purposes.

### BRIEF DESCRIPTION OF DRAWINGS

[0127] The following drawings are illustrative of aspects of the invention and are not meant to limit the scope of the invention as encompassed by the claims.

[0128] FIG. 1 is a block diagram of a computer system.

[0129] FIG. 2 is a flow diagram illustrating one aspect of a process for comparing a new nucleotide or protein sequence with a database of sequences in order to determine the homology levels between the new sequence and the sequences in the database.

[0130] FIG. 3 is a flow diagram illustrating one aspect of a process in a computer for determining whether two sequences are homologous.

[0131] FIG. 4 is a flow diagram illustrating one aspect of an identifier process 300 for detecting the presence of a feature in a sequence.

[0132] FIG. 5 illustrates an exemplary sugarcane processing processes of the invention incorporating use of at least one enzyme, or enzyme mixture, of the invention, as described in detail, below; FIG. 5A illustrates an exemplary sugar to ethanol process incorporating use of at least one enzyme, or enzyme mixture, of the invention; FIG. 5B illustrates an exemplary process of the invention incorporating use of at least one enzyme, or enzyme mixture, of the invention; and, FIG. 5C illustrates an exemplary process of the invention—an overview of the a dry mill process—that can incorporate use of at least one enzyme, or enzyme mixture, of the invention.

[0133] FIG. 6 illustrates an exemplary protocol for identifying an enzyme of the invention: a glucose oxidase assay for quantifying glucose, as described in detail in Example 5, below.

[0134] FIG. 7 illustrates data summarizing the results of various exemplary mixtures' enzymatic activity under conditions comprising 37° C. digest on 0.1% AVICEL® substrate, as described in detail in Example 4, below.

[0135] FIG. 8 illustrates data summarizing the results of the various exemplary mixtures' enzymatic activity under conditions comprising 37° C. digest on 0.23% bagasse, as described in detail in Example 4, below.

[0136] FIG. 9A illustrates a standard curve from an exemplary B-glucosidase activity assay, as described in detail in Example 14, below. FIG. 9B shows how enzyme activity calculations for the exemplary β-glucosidase activity assay can be set up in EXCEL™, as described in detail in Example 14, below.

[0137] FIG. 10A illustrates a standard curve from an exemplary B-glucosidase activity assay, as described in detail in Example 14, below. FIG. 10B shows how enzyme activity calculations for the exemplary β-glucosidase activity assay can be set up in EXCEL™, as described in detail in Example 14, below.

[0138] FIG. 11 illustrates Table 1, showing data from the production and purification summary for beta-glucosidase enzymes of this invention, as described in detail in Example 14, below.

[0139] FIG. 12A illustrates a PAGE electrophoresis of the exemplary SEQ ID NO:548, SEQ ID NO:564, and SEQ ID NO:560 of this invention purified from supernatant and pellet cell fractions by the FPLC method, as described in detail in Example 14, below.

[0140] FIG. 12B illustrates a PAGE electrophoresis of SEQ ID NO:530 and SEQ ID NO:566 purified from supernatant and pellet cell fractions by the FPLC method, as described in detail in Example 14, below.

[0141] FIG. 13 illustrates a Table 7, and shows protein concentrations of purified beta-glucosidases of this invention determined by the three different methods, as described in detail in Example 14, below.

[0142] FIG. 14 illustrates a Table 8, and shows the specific activities of purified beta-glucosidases of this invention, as described in detail in Example 14, below.

[0143] FIG. 15 illustrates a Table 1, and shows the specific activity of exemplary beta-glucosidases of this invention, as described in detail in Example 14, below.

[0144] FIG. 16 illustrates data of the initial rate kinetics with enzyme dilutions selected empirically for each tested beta-glucosidase enzyme of this invention, as described in detail in Example 15, below.

[0145] FIG. 17 illustrates a PAGE electrophoresis with the exemplary SEQ ID NO:556, SEQ ID NO:560 of this invention, and A. niger beta-glucosidase, as described in detail in Example 15, below.

[0146] FIG. 18 illustrates data showing the hydrolysis of 2 mM cellobiose at different temperatures at pH 5 using exemplary enzymes of this invention, as described in detail in Example 15, below.

[0147] FIG. 19 illustrates data showing the hydrolysis of 2 mM cellobiose at different temperatures at pH 7 using exemplary enzymes of this invention, as described in detail in Example 15, below.

[0148] FIG. 20 illustrates an example arrangement for three sample preps, as described in detail in Example 17, below.

[0149] FIG. 21 is a table summarizing SPECTRAMAX™ data for an exemplary cellulase enzyme activity assay of the invention liberating 4-methylumbelliferone from MU-glucopyranoside, as described in detail in Example 17, below.

[0150] FIG. 22 is a table summarizing kinetic activity data for an exemplary cellulase enzyme activity assay of the invention, as described in detail in Example 17, below.

[0151] FIG. 23 illustrates data showing the wheat arabinoxylan digest products (digest profiles) of three enzymes that can be used in enzyme “cocktails” or mixtures of the invention, as described in detail in Example 20, below.

[0152] FIG. 24 is a graphic illustration of data showing how arabinofuranosidases of the invention synergize with xylanases of the invention to digest wheat arabinoxylan, as described in detail in Example 20, below.

[0153] FIG. 25 is a graphic illustration of data showing a promotion effect of beta (β)-xylosidases (as indicated in the figure) over the exemplary SEQ ID NO:719 xylanase in a wheat arabinoxylan digest, as described in detail in Example 20, below.

[0154] FIG. 26 is a graphic illustration of data showing a ferulic acid esterase activity with corn seed fiber as a substrate using an exemplary enzyme of this invention, as described in detail in Example 20, below.

[0155] FIG. 27 is a graphic illustration of data showing from an activity assay with acetylated xylan as a substrate using the exemplary acetyl xylan esterases of this invention SEQ ID NO:640, SEQ ID NO:650 and SEQ ID NO:688, as described in detail in Example 20, below.

[0156] FIG. 28 is a graphic illustration of data showing an alpha (α)-glucuronidase activity assay with an aldo-uronic acid mixture as a substrate using the exemplary acetyl xylan esterases of this invention SEQ ID NO:648, SEQ ID NO:654 and SEQ ID NO:680, as described in detail in Example 20, below.

[0157] Like reference symbols in the various drawings indicate like elements.

### DETAILED DESCRIPTION

[0158] In one aspect, the invention provides polypeptides having any lignocellulolytic (lignocellulosic) activity, including ligninolytic and cellulolytic activity, including, e.g., a glycosyl hydrolase, cellulase, endoglucanase, cellobiohydrolase, mannanase and/or β-glucosidase activity, polynucleotides encoding these polypeptides, and methods of making and using these polynucleotides and polypeptides. In one aspect, the invention provides polypeptides having a lignocellulosic activity, e.g., glucose oxidase activity, including enzymes that convert soluble oligomers to fermentable monomeric sugars in the saccharification of biomass. In one aspect, an activity of a polypeptide of the invention comprises enzymatic hydrolysis of (to degrade) soluble cellooligsaccharides and arabinoxylan oligomers into monomer xylose, arabinose and glucose. In one aspect, the invention provides thermostable and thermotolerant forms of polypeptides of the invention. The polypeptides of the invention can be used in a variety of pharmaceutical, agricultural and industrial contexts.

[0159] In one aspect, the invention provides a lignocellulosic enzyme, e.g., a glycosyl hydrolase, cellulase, endoglucanase, cellobiohydrolase, beta-glucosidase, xylanase, mannanse, β-xylosidase and/or arabinofuranosidase, with an increased catalytic rate, thus improving the process of substrate hydrolysis. In one aspect, the invention provides a lignocellulosic enzyme active under relatively extreme conditions, e.g., high or low temperatures or salt conditions, and/or acid or basic conditions, including pHs and temperatures higher or lower than physiologic. This increased efficiency in catalytic rate leads to an increased efficiency in producing sugars that, in one embodiment, are used by microorganisms for ethanol production. In one aspect, microorganisms generating enzyme of the invention are used with sugar hydrolyzing, e.g., ethanol-producing, microorganisms. Thus, the invention provides methods for biofuel, e.g., a bioalcohol such as bioethanol, biomethanol, biobutanol or biopropanol, production and making “clean fuels” based on alcohols, e.g., for transportation using biofuels.

[0160] In one aspect the invention provides compositions (e.g., enzyme preparations, feeds, drugs, dietary supplements) comprising the enzymes, polypeptides or polynucleotides of the invention. These compositions can be formulated in a variety of forms, e.g., as liquids, gels, pills, tablets, sprays, powders, food, feed pellets or encapsulated forms, including nanoencapsulated forms.

[0161] Assays for measuring cellulase activity, e.g., endoglucanase, cellobiohydrolase, beta-glucosidase, xylanase, mannanse, β-xylosidase and/or arabinofuranosidase activity, e.g., for determining if a polypeptide has cellulase activity, e.g., endoglucanase, cellobiohydrolase, beta-glucosidase, xylanase, mannanse, β-xylosidase and/or arabinofuranosidase activity, are well known in the art and are within the scope of the invention; see, e.g., Baker W L, Panow A, Estimation of cellulase activity using a glucose-oxidase-Cu(II) reducing assay for glucose, J Biochem Biophys Methods. 1991 Dec., 23(4):265-73; Sharrock K R, Cellulase assay methods: a review, J Biochem Biophys Methods. 1988 Oct., 17(2):81-105; Carder J H, Detection and quantitation of cellulase by Congo red staining of substrates in a cup-plate diffusion assay, Anal Biochem. 1986 Feb. 15, 153(1):75-9; Canevascini G., A cellulase assay coupled to cellobiose dehydrogenase, Anal Biochem. 1985 June, 147(2):419-27; Huang J S, Tang J, Sensitive assay for cellulase and dextranase. Anal Biochem. 1976 Jun., 73(2):369-77.

[0162] The pH of reaction conditions utilized by the invention is another variable parameter for which the invention provides. In certain aspects, the pH of the reaction is conducted in the range of about 3.0 or less to about 9.0 or more, and in one embodiment an enzyme of the invention is active under such acidic or basic conditions. In other aspects, a process of the invention is practiced at a pH of about 4.0, 4.5, 5.0, 5.5, 6.0, 6.5, 7.5, 8.0, 8.5, 9.0 or 9.5, or more, and in one embodiment an enzyme of the invention is active under such acidic or basic conditions. Reaction conditions conducted under alkaline conditions also can be advantageous, e.g., in some industrial or pharmaceutical applications of enzymes of the invention.

[0163] The invention provides compositions, including pharmaceuticals, additives and supplements, comprising a lignocellulosic enzyme of the invention, including polypeptides having glycosyl hydrolase, cellulase, endoglucanase, cellobiohydrolase, beta-glucosidase, xylanase, mannanse, β-xylosidase and/or arabinofuranosidase activity, in a variety of forms and formulations. In the methods of the invention, the lignocellulosic enzymes of the invention also are used in a variety of forms and formulations. For example, purified the lignocellulosic enzyme can be used in enzyme preparations deployed in a biofuel, e.g., a bioalcohol such as bioethanol, biomethanol, biobutanol or biopropanol, production or in pharmaceutical, food, feed or dietary aid applications. Alternatively, the enzymes of the invention can be used directly or indirectly in processes to produce a biofuel, e.g., a bioalcohol such as bioethanol, biomethanol, biobutanol or biopropanol, make clean fuels, process biowastes, process foods, chemicals, pharmaceuticals, supplements, liquids, foods or feeds, and the like.

[0164] Alternatively, the lignocellulosic enzyme, e.g., glycosyl hydrolase, cellulase, endoglucanase, cellobiohydrolase, beta-glucosidase, xylanase, mannanse, β-xylosidase and/or arabinofuranosidase polypeptides of the invention can be expressed in a microorganism (including bacterial, yeast, viruses, fungi and the like) using procedures known in the art. The microorganism expressing an enzyme of the invention can live on or in a plant, plant part (e.g., a seed) or an organism. In other aspects, the lignocellulosic enzyme of the invention can be immobilized on a solid support prior to use in the methods of the invention. Methods for immobilizing enzymes on solid supports are commonly known in the art, for example J. Mol. Cat. B: Enzymatic 6 (1999) 29-39; Chivata et al. Biocatalysis: Immobilized cells and enzymes, J Mol. Cat. 37 (1986) 1-24: Sharma et al., Immobilized Biomaterials Techniques and Applications, Angew. Chem. Int. Ed. Engl. 21 (1982) 837-54: Laskin (Ed.), Enzymes and Immobilized Cells in Biotechnology.

### Nucleic Acids, Probes and Inhibitory Molecules

[0165] The invention provides isolated, synthetic and recombinant nucleic acids, e.g., see Tables 1, 2, and 3, and the Examples, below, and the sequences of exemplary nucleic acids and polypeptides of the invention are set forth in the Sequence Listing; also describing exemplary nucleic acids encoding exemplary polypeptides of the invention, see e.g., Tables 1, 2, and 3, and Sequence Listing; including expression cassettes such as expression vectors, viruses, artificial chromosomes or any cloning vehicle, all comprising a nucleic acid of the invention.

[0166] In the sequence listing, for SEQ ID NOs:1-472, odd numbers represent nucleic acid protein-coding sequences and even number represent amino acid sequences. In reading the SEQ ID listing, in summary:
[0167] SEQ ID NOs:1-472: odd numbers represent nucleic acid protein-coding sequences and even numbers represent amino acid sequences;
[0168] SEQ ID NOs:473-479 represent amino acid sequences, SEQ ID NOs:480-488 represent nucleotide sequences;
[0169] SEQ ID NOs:489-700: odd numbers represent nucleic acid protein-coding sequences and even numbers represent amino acid sequences;
[0170] SEQ ID NOs:701-706 are linkers, all amino acid sequences;
[0171] SEQ ID NOs:707-717 are genomic, or gDNA, sequences for some of the enzymes initially derived from fungal sources (all nucleotides);
[0172] SEQ ID NOs:718-721: even numbers represent nucleotide sequences, odd numbers represent amino acid sequences).

[0173] For those sequences listed in Table 1A, which notes that SEQ ID NO:370, SEQ ID NO:373, SEQ ID NO:376, SEQ ID NO:379, SEQ ID NO:382, SEQ ID NO:385, SEQ ID NO:388, SEQ ID NO:391, SEQ ID NO:394, SEQ ID NO:397, SEQ ID NO:400, SEQ ID NO:403, SEQ ID NO:406, SEQ ID NO:409, SEQ ID NO:412, SEQ ID NO:415, SEQ ID NO:418 and SEQ ID NO:421 are exemplary enzyme coding, or cDNA sequences; and, SEQ ID NO:369, SEQ ID NO:372, SEQ ID NO:375, SEQ ID NO:378, SEQ ID NO:381, SEQ ID NO:384, SEQ ID NO:387, SEQ ID NO:390, SEQ ID NO:393, SEQ ID NO:396, SEQ ID NO:399, SEQ ID NO:402, SEQ ID NO:405, SEQ ID NO:408, SEQ ID NO:411, SEQ ID NO:414, SEQ ID NO:417 and SEQ ID NO:420, are exemplary genomic (or “gDNA”) sequences; and, SEQ ID NO:371, SEQ ID NO:374, SEQ ID NO:377, SEQ ID NO:380, SEQ ID NO:383, SEQ ID NO:386, SEQ ID NO:389, SEQ ID NO:392, SEQ ID NO:395, SEQ ID NO:398, SEQ ID NO:401, SEQ ID NO:404, SEQ ID NO:407, SEQ ID NO:410, SEQ ID NO:413, SEQ ID NO:416, SEQ ID NO:419 and SEQ ID NO:422, are exemplary protein (amino acid) sequences.

[0174] In summary:

TABLE 1A

| | gDNA SEQ ID | predicted cDNA | predicted protein |
|---|---|---|---|
| SEQ ID NO: | NO: | SEQ ID NO: | SEQ ID NO: |
| 369-371 | 369 | 370 | 371 |
| 372-374 | 372 | 373 | 374 |
| 375-377 | 375 | 376 | 377 |
| 378-380 | 378 | 379 | 380 |
| 381-383 | 381 | 382 | 383 |
| 384-386 | 384 | 385 | 386 |
| 387-389 | 387 | 388 | 389 |
| 390-392 | 390 | 391 | 392 |
| 393-395 | 393 | 394 | 395 |
| 396-398 | 396 | 397 | 398 |
| 399-401 | 399 | 400 | 401 |
| 402-404 | 402 | 403 | 404 |
| 405-407 | 405 | 406 | 407 |
| 408-410 | 408 | 409 | 410 |
| 411-413 | 411 | 412 | 413 |
| 414-416 | 414 | 415 | 416 |
| 417-419 | 417 | 418 | 419 |
| 420-422 | 420 | 421 | 422 |

TABLE 1B

| | | predicted | predicted |
|---|---|---|---|
| | gDNA SEQ | cDNA | protein |
| SEQ ID NOs: | ID NO: | SEQ ID NO: | SEQ ID NO: |
| 493, 494 | 707 | 493 | 494 |
| 495, 496 | 710 | 495 | 496 |
| 497, 498 | 711 | 497 | 498 |
| 499, 500 | 712 | 499 | 500 |
| 501, 502 | 713 | 501 | 502 |
| 503, 504 | 714 | 503 | 504 |
| 505, 506 | 715 | 505 | 506 |
| 507, 508 | 716 | 507 | 508 |
| 509, 510 | 717 | 509 | 510 |
| 511, 512 | 708 | 511 | 512 |
| 513, 514 | 709 | 513 | 514 |

[0175] The sequences listed in Table 1A and 1B, above, were initially derived from fungal sources, i.e., these exemplary sequences of the invention are fungal-derived nucleic acids and enzymes.

[0176] Tables 2 and 3, below are charts describing selected characteristics, including enzymatic activity, of exemplary nucleic acids and polypeptides of the invention, including sequence identity comparison of the exemplary sequences to public databases to identify activity of enzymes of the invention by homology (sequence identity) analysis. All sequences described in Tables 2 and 3 (all the exemplary sequences of the invention) have been subject to a BLAST search (as described in detail, below) against two sets of databases. The first database set is available through NCBI (National Center for Biotechnology Information). All results from searches against these databases are found in the columns entitled “NR Description”, “NR Accession Code”, “NR Evalue” or “NR Organism”. “NR” refers to the Non-Redundant nucleotide database maintained by NCBI. This database is a composite of GenBank, GenBank updates, and EMBL updates. The entries in the column “NR Description” refer to the definition line in any given NCBI record, which includes a description of the sequence, such as the source organism, gene name/protein name, or some description of the function of the sequence—thus identifying an activity of the listed exemplary enzymes of the invention by homology (sequence identity) analysis. The entries in the column “NR Accession Code” refer to the unique identifier given to a sequence record. The entries in the column “NR Evalue” refer to the Expect value (Evalue), which represents the probability that an alignment score as good as the one found between the query sequence (the sequences of the invention) and a database sequence would be found in the same number of comparisons between random sequences as was done in the present BLAST search. The entries in the column “NR Organism” refer to the source organism of the sequence identified as the closest BLAST (sequence homology) hit. The second set of databases is collectively known as the GENESEQ™ database, which is available through Thomson Derwent (Philadelphia, Pa.). All results from searches against this database are found in the columns entitled “GENESEQ™ Protein Description”, “GENESEQ™ Protein Accession Code”, “GENESEQ™ Protein Evalue”, “GENESEQ™ DNA Description”, “GENESEQ™ DNA Accession Code” or “GENESEQ™ DNA Evalue”. The information found in these columns is comparable to the information found in the NR columns described above, except that it was derived from BLAST searches against the GENESEQ™ database instead of the NCBI databases. In addition, this table includes the column “Predicted EC No.”. An EC number is the number assigned to a type of enzyme according to a scheme of standardized enzyme nomenclature developed by the Enzyme Commission of the Nomenclature Committee of the International Union of Biochemistry and Molecular Biology (IUBMB). The results in the “Predicted EC No.” column are determined by a BLAST search against the Kegg (Kyoto Encyclopedia of Genes and Genomes) database. If the top BLAST match has an Evalue equal to or less than e⁻⁶, the EC number assigned to the top match is entered into the table. The EC number of the top hit is used as a guide to what the EC number of the sequence of the invention might be. The columns “Query DNA Length” and “Query Protein Length” refer to the number of nucleotides or the number amino acids, respectively, in the sequence of the invention that was searched or queried against either the NCBI or GENESEQ™ databases. The columns “GENESEQ™ or NR DNA Length” and “GENESEQ™ or NR Protein Length” refer to the number of nucleotides or the number amino acids, respectively, in the sequence of the top match from the BLAST search. The results provided in these columns are from the search that returned the lower Evalue, either from the NCBI databases or the Geneseq database. The columns “GENESEQ™ or NR % ID Protein” and “GENESEQ™ or NR % ID DNA” refer to the percent sequence identity between the sequence of the invention and the sequence of the top BLAST match. The results provided in these columns are from the search that returned the lower Evalue, either from the NCBI databases or the GENESEQ™ database.

[0177] Activity of exemplary sequences of the invention are listed in, inter alia, Tables 2 and 3, below (see also Tables 4 and 5, which lists exemplary enzyme mixtures, and CBMs, of the invention, respectively). To further aid in reading the tables, for example, in the first row of Table 2, labeled “SEQ ID NO:”, the numbers 369-371 represent the exemplary polypeptide of the invention having a sequence as set forth in SEQ ID NO:371, encoded by, e.g., SEQ ID NO:369 (this is a genomic sequence, as explained above); the “enzyme activity by homology” is the enzyme's activity assignment based on a top (closest) BLAST hit; the “enzyme activity by experiment” is the enzyme's activity in a broad interpretation as determined by experimental protocol; the “GH family” indicates the glycosyl hydrolase family of the listed exemplary enzyme; the “activity on PASC” is an experimentally determined level of activity of the listed enzyme on the substrate phosphoric acid swollen cellulose (PASC), as described below; the “Signalp Cleavage Site” is the listed exemplary enzyme's signal sequence (or “signal peptide”, or SP), as determined by the paradigm Signalp, as discussed below (see Nielsen (1997), infra); the “Predicted Signal Sequence” is listed from the amino terminal to the carboxy terminal, for example, for the polypeptide SEQ ID NO:38 in the second row of Table 2, the signal peptide is “MVKSRKISILLAVAMLVSIMIPTTAFA”; the “source” is the microorganism source from which the exemplary nucleic acid and polypeptide of the invention was first derived.

TABLE 2

| | | | Activity on | Predicted |
|---|---|---|---|---|
| SEQ ID NO: | Activity | GH Family | PASC? | EC Number |
| 1, 2 | Glycosidase | 6 | Yes | 3.2.1.91 |
| 101, 102 | Glycosidase | 48 | Yes | |
| 103, 104 | Glycosidase | 5 | Yes | 3.2.1.4 |
| 105, 106 | Glycosidase | 5 | Yes | 3.2.1.4 |
| 107, 108 | Glycosidase | 45 | Yes | |
| 109, 110 | Glycosidase | 5 | Yes | 3.2.1.4 |
| 11, 12 | Glycosidase | 6 | Yes | 3.2.1.91 |
| 111, 112 | Glycosidase | 5 | Yes | 3.2.1.4 |
| 113, 114 | Glycosidase | 5 | Yes | 3.2.1.4 |
| 115, 116 | Glycosidase | 48 | No | 3.2.1.4 |
| 117, 118 | Glycosidase | 5 | Yes | 3.2.1.4 |
| 119, 120 | Glycosidase | 5 | Yes | 3.2.1.4 |
| 121, 122 | Glycosidase | 5 | Yes | 3.2.1.4 |
| 123, 124 | Glycosidase | 3 | No | 3.2.1.21 |
| 125, 126 | Glycosidase | 5 | Yes | 3.2.1.4 |
| 127, 128 | Glycosidase | 5 | Yes | 3.2.1.4 |
| 129, 130 | Glycosidase | 5 | Yes | 3.2.1.4 |
| 13, 14 | Glycosidase | 6 | Yes | |
| 131, 132 | Glycosidase | 5 | Yes | 3.2.1.4 |
| 133, 134 | Glycosidase | 5 | Yes | 3.2.1.4 |
| 135, 136 | Glycosidase | 48 | Yes | |
| 137, 138 | Glycosidase | 48 | Yes | 3.2.1.8 |
| 139, 140 | Glycosidase | 48 | Yes | |
| 141, 142 | Glycosidase | 5 | Yes | 3.2.1.4 |
| 143, 144 | Glycosidase | 5 | Yes | 3.2.1.4 |
| 145, 146 | Glycosidase | 9 | Yes | |
| 147, 148 | Glycosidase | 5 | Yes | 3.2.1.4 |
| 149, 150 | Glycosidase | 5 | Yes | 3.2.1.4 |
| 15, 16 | Glycosidase | 6 | Yes | 3.2.1.91 |
| 151, 152 | Glycosidase | 9 | Yes | |
| 153, 154 | Glycosidase | 5 | Yes | 3.2.1.4 |
| 155, 156 | Glycosidase | 9 | Yes | 3.2.1.4 |
| 157, 158 | Glycosidase | 5 | Yes | 3.2.1.4 |
| 159, 160 | Glycosidase | 5 | Yes | 3.2.1.4 |
| 161, 162 | Glycosidase | 45 | Yes | 3.2.1.3 |
| 163, 164 | Glycosidase | 6 | Yes | 3.2.1.91 |
| 165, 166 | Glycosidase | 6 | Yes | 3.2.1.91 |
| 167, 168 | Glycosidase | 5 | Yes | 3.2.1.4 |
| 169, 170 | Glycosidase | 48 | Yes | 3.2.1.4 |
| 17, 18 | Glycosidase | 48 | Yes | |
| 171, 172 | Glycosidase | 48 | Yes | |
| 173, 174 | Glycosidase | 48 | Yes | 3.2.1.4 |
| 175, 176 | Glycosidase | 48 | Yes | 3.2.1.4 |
| 177, 178 | Glycosidase | 48 | Yes | 3.2.1.4 |
| 179, 180 | Glycosidase | 48 | Yes | 3.2.1.3 |
| 181, 182 | Glycosidase | 6 | Yes | 3.2.1.91 |
| 183, 184 | Glycosidase | 6 | Yes | 3.2.1.91 |
| 185, 186 | Glycosidase | 6 | Yes | 3.2.1.91 |
| 187, 188 | Glycosidase | 48 | Yes | |
| 189, 190 | Glycosidase | 48 | Yes | 3.2.1.3 |
| 19, 20 | Glycosidase | 6 | No | 3.2.1.91 |
| 191, 192 | Glycosidase | 6 | Yes | 3.2.1.91 |
| 193, 194 | Glycosidase | 48 | Yes | 3.2.1.4 |
| 195, 196 | Glycosidase | 48 | Yes | 3.2.1.8 |
| 197, 198 | Glycosidase | 6 | No | |
| 199, 200 | Glycosidase | 6 | No | |
| 201, 202 | Glycosidase | 6 | Yes | 3.2.1.91 |
| 203, 204 | Glycosidase | 6 | Yes | 3.2.1.91 |
| 205, 206 | Glycosidase | 9 | No | 3.2.1.4 |
| 207, 208 | Glycosidase | 48 | Yes | |
| 209, 210 | Glycosidase | 6 | Yes | 3.2.1.91 |
| 21, 22 | Glycosidase | 5 | Yes | 3.2.1.4 |
| 211, 212 | Glycosidase | 9 | Yes | 3.2.1.4 |
| 213, 214 | Glycosidase | 5 | Yes | 3.2.1.4 |
| 215, 216 | Glycosidase | 6 | No | 3.2.1.91 |
| 217, 218 | Glycosidase | 6 | Yes | |
| 219, 220 | Glycosidase | 6 | Yes | |
| 221, 222 | Glycosidase | 6 | Yes | 3.2.1.91 |
| 223, 224 | Glycosidase | 6 | Yes | 3.2.1.91 |
| 225, 226 | Glycosidase | 6 | Yes | 3.2.1.91 |
| 227, 228 | Glycosidase | 6 | No | 3.2.1.91 |
| 229, 230 | Glycosidase | 6 | Yes | 3.2.1.91 |
| 23, 24 | Glycosidase | 6 | Yes | |
| 231, 232 | Glycosidase | 9 | Yes | |
| 233, 234 | Glycosidase | 5 | Yes | 3.2.1.4 |
| 235, 236 | Glycosidase | 6 | Yes | |
| 237, 238 | Glycosidase | 6 | No | 3.2.1.91 |
| 239, 240 | Glycosidase | 6 | Yes | |
| 241, 242 | Glycosidase | 48 | Yes | 3.2.1.8 |
| 243, 244 | Glycosidase | 6 | Yes | 3.2.1.91 |
| 245, 246 | Glycosidase | 9 | Yes | 3.2.1.4 |
| 247, 248 | Glycosidase | 9 | Yes | 3.2.1.4 |
| 249, 250 | Glycosidase | 5 | Yes | 3.2.1.4 |
| 25, 26 | Glycosidase; GH family 6 (cellulase) | 6 | Yes | 3.2.1.91 |
| 251, 252 | Glycosidase | 45 | Yes | 3.2.1.3 |
| 253, 254 | Glycosidase | 48 | No | 3.2.1.4 |
| 255, 256 | Glycosidase | 48 | No | 3.2.1.4 |
| 257, 258 | Glycosidase | 48 | No | 3.2.1.4 |
| 259, 260 | Glycosidase | 48 | No | 3.2.1.4 |
| 261, 262 | Glycosidase | 5 | Yes | 3.2.1.4 |
| 263, 264 | Glycosidase | 48 | Yes | 3.2.1.4 |
| 265, 266 | Glycosidase | | No | |
| 267, 268 | Glycosidase | 6 | Yes | 3.2.1.91 |
| 269, 270 | Glycosidase | 5 | No | 3.2.1.4 |
| 27, 28 | Glycosidase | 7 | No | |
| 271, 272 | Glycosidase | 5 | Yes | 3.2.1.4 |
| 273, 274 | Glycosidase | 5 | Yes | 3.2.1.4 |
| 275, 276 | Glycosidase | 5 | Yes | 3.2.1.4 |
| 277, 278 | Glycosidase | 5 | No | 3.2.1.4 |
| 279, 280 | Glycosidase | 5 | Yes | 3.2.1.4 |
| 281, 282 | Glycosidase | 6 | Yes | 3.2.1.91 |
| 283, 284 | Glycosidase | 5 | Yes | 3.2.1.4 |
| 285, 286 | Glycosidase | 5 | No | 3.2.1.4 |
| 287, 288 | Glycosidase | 5 | Yes | 3.2.1.4 |
| 289, 290 | Glycosidase | 5 | Yes | 3.2.1.4 |
| 29, 30 | Glycosidase | 7 | No | |
| 291, 292 | Glycosidase | 9 | Yes | 3.2.1.4 |
| 293, 294 | Glycosidase | 9 | Yes | 3.2.1.4 |
| 295, 296 | Glycosidase | 9 | No | 3.2.1.4 |
| 297, 298 | Glycosidase | 9 | No | 3.2.1.4 |
| 299, 300 | Glycosidase | 9 | No | 3.2.1.4 |
| 3, 4 | Glycosidase | 6 | Yes | 3.2.1.91 |
| 301, 302 | Glycosidase | 9 | No | 3.2.1.4 |
| 303, 304 | Glycosidase | 9 | Yes | 3.2.1.4 |
| 305, 306 | Glycosidase | 5 | Yes | 3.2.1.4 |
| 307, 308 | Glycosidase | 5 | Yes | 3.2.1.4 |
| 309, 310 | Glycosidase | 9 | No | 3.2.1.4 |
| 31, 32 | Glycosidase | 7 | Yes | |
| 311, 312 | Glycosidase | 5 | Yes | 3.2.1.4 |
| 313, 314 | Glycosidase | 45 | No | |
| 315, 316 | Glycosidase | 6 | No | 3.2.1.91 |
| 317, 318 | Glycosidase | 6 | No | 3.2.1.91 |
| 319, 320 | Glycosidase | 6 | No | 3.2.1.91 |
| 321, 322 | Glycosidase | 6 | No | 3.2.1.91 |
| 323, 324 | Glycosidase | 6 | No | |
| 325, 326 | Glycosidase | 6 | No | |
| 327, 328 | Glycosidase | 6 | No | |
| 329, 330 | Glycosidase | 6 | No | |
| 33, 34 | Glycosidase; Cellobiohydrolase | 7 | Yes | |
| 331, 332 | Glycosidase | 6 | No | |
| 333, 334 | Glycosidase | 6 | No | 3.2.1.91 |
| 335, 336 | Glycosidase | 6 | No | 3.2.1.91 |
| 337, 338 | Glycosidase | 9 | No | 3.2.1.4 |
| 339, 340 | Glycosidase | 9 | No | |
| 341, 342 | Glycosidase | 6 | No | 3.2.1.91 |
| 343, 344 | Glycosidase | 6 | No | 3.2.1.91 |
| 345, 346 | Glycosidase | 6 | No | 3.2.1.91 |
| 347, 348 | Glycosidase | 45 | | |
| 349, 350 | Glycosidase | 6 | | 3.2.1.91 |
| 35, 36 | Glycosidase | 6 | Yes | 3.2.1.91 |
| 351, 352 | Glycosidase | 6 | | 3.2.1.91 |
| 353, 354 | Glycosidase | 6 | Yes | 3.2.1.91 |
| 355, 356 | Glycosidase | 7 | Yes | |
| 357, 358 | Glycosidase | 6 | Yes | 3.2.1.91 |
| 359, 360 | Glycosidase; Cellobiohydrolase | 7 | Yes | |
| 361, 362 | Glycosidase | 9 | Yes | |
| 363, 364 | Glycosidase | 8 | Yes | 3.2.1.14 |
| 365, 366 | Glycosidase | 8 | Yes | |
| 367, 368 | Glycosidase | 9 | Yes | |
| 369-371 | | 7 | Yes | |
| 37, 38 | Glycosidase | 48 | Yes | |
| 372-374 | | 6 | No | |
| 375-377 | | 6 | Yes | |
| 378-380 | | 6 | Yes | |
| 381-383 | | 6 | Yes | |
| 384-386 | | 6 | No | |
| 387-389 | | 6 | No | |
| 39, 40 | Glycosidase | 48 | Yes | 3.2.1.4 |
| 390-392 | | 6 | Yes | |
| 393-395 | | 6 | Yes | |
| 396-398 | | 6 | Yes | |
| 399-401 | | 6 | Yes | |
| 402-404 | | 6 | No | |
| 405-407 | | 6 | Yes | |
| 408-410 | | 6 | Yes | |
| 41, 42 | Glycosidase | 5 | Yes | 3.2.1.4 |
| 411-413 | | 6 | Yes | |
| 414-416 | | 6 | No | |
| 417-419 | | 6 | Yes | |
| 420-422 | | 6 | Yes | |
| 423, 424 | β-glucosidase | | | 3.2.1.21 |
| 425, 426 | | | | 3.2.1.4 |
| 427, 428 | Alkaline endoglucanase/cellulase | | | 3.2.1.4 |
| 429, 430 | | | | 3.2.1.4 |
| 43, 44 | Glycosidase | 9 | Yes | 3.2.1.4 |
| 431, 432 | Glycosidase | | | 3.2.1.8 |
| 433, 434 | Glycosidase | | | 3.2.1.8 |
| 435, 436 | Glycosidase | | | 3.2.1. |
| 437, 438 | Glycosidase | | | 3.2.1.4 |
| 439, 440 | Glycosidase | | | 3.2.1.8 |
| 441, 442 | Glycosidase | | | 3.2.1.8 |
| 443, 444 | Glycosidase | | | 3.2.1.8 |
| 445, 446 | Glycosidase | | | |
| 447, 448 | Glycosidase | | | 3.2.1.4 |
| 449, 450 | | | | 3.2.1.8 |
| 45, 46 | Glycosidase | | Yes | 3.2.1.55 |
| 451, 452 | Esterase | | | |
| 453, 454 | Glycosidase | | | |
| 455, 456 | Binding | | | |
| 457, 458 | Binding | | | |
| 459, 460 | | | | |
| 461, 462 | Glycosidase | | | 3.2.1. |
| 463, 464 | | | | 3.2.1.4 |
| 465, 466 | | | | 3.2.1.4 |
| 467, 468 | | | | 3.2.1.8 |
| 469, 470 | | | | 3.2.1.4 |
| 47, 48 | Glycosidase | 9 | Yes | 3.2.1.4 |
| 471, 472 | | | | 3.2.1.4 |
| 49, 50 | Glycosidase | 5 | Yes | 3.2.1.4 |
| 5, 6 | Glycosidase | 6 | Yes | 3.2.1.8 |
| 51, 52 | Glycosidase | 9 | Yes | |
| 53, 54 | Glycosidase | 5 | Yes | 3.2.1.4 |
| 55, 56 | Glycosidase | 5 | Yes | 3.2.1.4 |
| 57, 58 | Glycosidase | 9 | Yes | 3.2.1.4 |
| 59, 60 | Glycosidase | 45 | Yes | |
| 61, 62 | Glycosidase | 9 | Yes | |
| 63, 64 | Glycosidase | 9 | Yes | 3.2.1.4 |
| 65, 66 | Glycosidase | 5 | Yes | 3.2.1.4 |
| 67, 68 | Glycosidase | 5 | Yes | 3.2.1.4 |
| 69, 70 | Glycosidase | 5 | No | 3.2.1.4 |
| 7, 8 | Glycosidase | 5 | Yes | 3.2.1.4 |
| 71, 72 | Glycosidase | 45 | Yes | |
| 73, 74 | Glycosidase | 5 | Yes | 3.2.1.4 |
| 75, 76 | Glycosidase | 9 | Yes | 3.2.1.4 |
| 77, 78 | Glycosidase | 5 | Yes | 3.2.1.4 |
| 79, 80 | Glycosidase | 5 | Yes | 3.2.1.4 |
| 81, 82 | Glycosidase | | Yes | 3.2.1.55 |
| 83, 84 | Glycosidase | 5 | Yes | 3.2.1.4 |
| 85, 86 | Glycosidase | 9 | Yes | 3.2.1.4 |
| 87, 88 | Glycosidase | 5 | Yes | 3.2.1.4 |
| 89, 90 | Glycosidase | 5 | Yes | 3.2.1.4 |
| 9, 10 | Glycosidase | 5 | Yes | 3.2.1.4 |
| 91, 92 | Glycosidase | 48 | Yes | |
| 93, 94 | Glycosidase | 48 | Yes | 3.2.1.4 |
| 95, 96 | Glycosidase | 48 | Yes | 3.2.1.4 |
| 97, 98 | Glycosidase | 48 | Yes | |
| 99, 100 | Glycosidase | 48 | Yes | |

| | | GH | |
|---|---|---|---|
| SEQ ID NO: | Activity | Family | Signalp Cleavage Site |
| 473 | Glycine max glycinin GY1 | | |
| | signal sequence | | |
| 474 | ER retention sequence | | |
| 475 | sporamin vacuolar | | |
| | targeting sequence | | |
| 476 | transit peptide from | | |
| | ferredoxin-NADP+ | | |
| | reductase (FNR) of | | |
| | Cyanophora paradoxa | | |
| 477 | protein storage vacuole | | |
| | (PSV) sequence from b- | | |
| | conglycinin | | |
| 478 | gamma zein 27 kD signal | | |
| | sequence | | |
| 479 | vacuole sequence domain | | |
| | (VSD) from barley | | |
| | polyamine oxidase | | |
| 480 | dicot optimized SEQ ID | | |
| | NO: 359 | | |
| 481 | dicot optimized SEQ ID | | |
| | NO: 357 | | |
| 482 | dicot optimized SEQ ID | | |
| | NO: 167 | | |
| 483 | monocot optimized SEQ | | |
| | ID NO: 359 | | |
| 484 | monocot optimized SEQ | | |
| | ID NO: 357 | | |
| 485 | monocot optimized SEQ | | |
| | ID NO: 167 | | |
| 486 | monocot optimized SEQ | | |
| | ID NO: 33 | | |
| 487 | dicot optimized SEQ ID | | |
| | NO: 33 | | |
| 488 | Cestrum yellow leaf curl | | |
| | virus promoter plus leader | | |
| 701 | linker | | |
| 702 | linker | | |
| 703 | linker | | |
| 704 | linker | | |
| 705 | linker | | |
| 706 | linker | | |
| 1, 2 | Glycosidase | 6 | Probability: 1.000 AA1: 33 AA2: 34 |
| 101, 102 | Glycosidase | 48 | Probability: 0.889 AA1: 19 AA2: 20 |
| 103, 104 | Glycosidase | 5 | Probability: 1.000 AA1: 24 AA2: 25 |
| 105, 106 | Glycosidase | 5 | |
| 107, 108 | Glycosidase | 45 | Probability: 1.000 AA1: 21 AA2: 22 |
| 109, 110 | Glycosidase | 5 | |
| 11, 12 | Glycosidase | 6 | Probability: 1.000 AA1: 30 AA2: 31 |
| 111, 112 | Glycosidase | 5 | Probability: 0.819 AA1: 18 AA2: 19 |
| 113, 114 | Glycosidase | 5 | |
| 115, 116 | Glycosidase | 48 | |
| 117, 118 | Glycosidase | 5 | |
| 119, 120 | Glycosidase | 5 | |
| 121, 122 | Glycosidase | 5 | |
| 123, 124 | Glycosidase | 3 | |
| 125, 126 | Glycosidase | 5 | |
| 127, 128 | Glycosidase | 5 | |
| 129, 130 | Glycosidase | 5 | |
| 13, 14 | Glycosidase | 6 | Probability: 1.000 AA1: 24 AA2: 25 |
| 131, 132 | Glycosidase | 5 | Probability: 1.000 AA1: 23 AA2: 24 |
| 133, 134 | Glycosidase | 5 | |
| 135, 136 | Glycosidase | 48 | Probability: 1.000 AA1: 32 AA2: 33 |
| 137, 138 | Glycosidase | 48 | Probability: 1.000 AA1: 37 AA2: 38 |
| 139, 140 | Glycosidase | 48 | Probability: 1.000 AA1: 38 AA2: 39 |
| 141, 142 | Glycosidase | 5 | |
| 143, 144 | Glycosidase | 5 | Probability: 1.000 AA1: 25 AA2: 26 |
| 145, 146 | Glycosidase | 9 | Probability: 1.000 AA1: 31 AA2: 32 |
| 147, 148 | Glycosidase | 5 | Probability: 0.998 AA1: 31 AA2: 32 |
| 149, 150 | Glycosidase | 5 | Probability: 0.997 AA1: 22 AA2: 23 |
| 15, 16 | Glycosidase | 6 | |
| 151, 152 | Glycosidase | 9 | Probability: 1.000 AA1: 32 AA2: 33 |
| 153, 154 | Glycosidase | 5 | |
| 155, 156 | Glycosidase | 9 | Probability: 1.000 AA1: 41 AA2: 42 |
| 157, 158 | Glycosidase | 5 | |
| 159, 160 | Glycosidase | 5 | Probability: 1.000 AA1: 28 AA2: 29 |
| 161, 162 | Glycosidase | 45 | Probability: 1.000 AA1: 21 AA2: 22 |
| 163, 164 | Glycosidase | 6 | Probability: 1.000 AA1: 24 AA2: 25 |
| 165, 166 | Glycosidase | 6 | Probability: 1.000 AA1: 30 AA2: 31 |
| 167, 168 | Glycosidase; | 5 | Probability: 0.829 AA1: 18 AA2: 19 |
| | Endoglucanase | | |
| 169, 170 | Glycosidase | 48 | Probability: 1.000 AA1: 52 AA2: 53 |
| 17, 18 | Glycosidase | 48 | Probability: 1.000 AA1: 37 AA2: 38 |
| 171, 172 | Glycosidase | 48 | Probability: 1.000 AA1: 28 AA2: 29 |
| 173, 174 | Glycosidase | 48 | |
| 175, 176 | Glycosidase | 48 | |
| 177, 178 | Glycosidase | 48 | Probability: 0.998 AA1: 37 AA2: 38 |
| 179, 180 | Glycosidase | 48 | Probability: 1.000 AA1: 38 AA2: 39 |
| 181, 182 | Glycosidase | 6 | Probability: 1.000 AA1: 69 AA2: 70 |
| 183, 184 | Glycosidase | 6 | Probability: 1.000 AA1: 45 AA2: 46 |
| 185, 186 | Glycosidase | 6 | Probability: 0.995 AA1: 41 AA2: 42 |
| 187, 188 | Glycosidase | 48 | |
| 189, 190 | Glycosidase | 48 | Probability: 1.000 AA1: 38 AA2: 39 |
| 19, 20 | Glycosidase | 6 | Probability: 0.996 AA1: 23 AA2: 24 |
| 191, 192 | Glycosidase | 6 | |
| 193, 194 | Glycosidase | 48 | |
| 195, 196 | Glycosidase | 48 | Probability: 1.000 AA1: 37 AA2: 38 |
| 197, 198 | Glycosidase | 6 | Probability: 1.000 AA1: 18 AA2: 19 |
| 199, 200 | Glycosidase | 6 | Probability: 1.000 AA1: 18 AA2: 19 |
| 201, 202 | Glycosidase | 6 | Probability: 0.943 AA1: 19 AA2: 20 |
| 203, 204 | Glycosidase | 6 | Probability: 0.943 AA1: 19 AA2: 20 |
| 205, 206 | Glycosidase | 9 | Probability: 0.830 AA1: 31 AA2: 32 |
| 207, 208 | Glycosidase | 48 | Probability: 1.000 AA1: 26 AA2: 27 |
| 209, 210 | Glycosidase | 6 | Probability: 1.000 AA1: 29 AA2: 30 |
| 21, 22 | Glycosidase | 5 | Probability: 1.000 AA1: 28 AA2: 29 |
| 211, 212 | Glycosidase | 9 | |
| 213, 214 | Glycosidase | 5 | |
| 215, 216 | Glycosidase | 6 | Probability: 0.965 AA1: 29 AA2: 30 |
| 217, 218 | Glycosidase | 6 | Probability: 0.998 AA1: 38 AA2: 39 |
| 219, 220 | Glycosidase | 6 | Probability: 0.998 AA1: 38 AA2: 39 |
| 221, 222 | Glycosidase | 6 | Probability: 1.000 AA1: 30 AA2: 31 |
| 223, 224 | Glycosidase | 6 | Probability: 1.000 AA1: 30 AA2: 31 |
| 225, 226 | Glycosidase | 6 | Probability: 1.000 AA1: 23 AA2: 24 |
| 227, 228 | Glycosidase | 6 | Probability: 1.000 AA1: 30 AA2: 31 |
| 229, 230 | Glycosidase | 6 | Probability: 1.000 AA1: 30 AA2: 31 |
| 23, 24 | Glycosidase | 6 | Probability: 0.983 AA1: 33 AA2: 34 |
| 231, 232 | Glycosidase | 9 | Probability: 1.000 AA1: 22 AA2: 23 |
| 233, 234 | Glycosidase | 5 | Probability: 1.000 AA1: 22 AA2: 23 |
| 235, 236 | Glycosidase | 6 | Probability: 0.999 AA1: 37 AA2: 38 |
| 237, 238 | Glycosidase | 6 | Probability: 0.999 AA1: 37 AA2: 38 |
| 239, 240 | Glycosidase | 6 | Probability: 0.999 AA1: 37 AA2: 38 |
| 241, 242 | Glycosidase | 48 | Probability: 0.985 AA1: 28 AA2: 29 |
| 243, 244 | Glycosidase | 6 | Probability: 0.992 AA1: 19 AA2: 20 |
| 245, 246 | Glycosidase | 9 | Probability: 1.000 AA1: 33 AA2: 34 |
| 247, 248 | Glycosidase | 9 | Probability: 0.675 AA1: 68 AA2: 69 |
| 249, 250 | Glycosidase | 5 | Probability: 1.000 AA1: 22 AA2: 23 |
| 25, 26 | Glycosidase; ORF 012 - | 6 | 1-29 |
| | family 6 (cellulase) | | |
| 251, 252 | Glycosidase | 45 | Probability: 1.000 AA1: 21 AA2: 22 |
| 253, 254 | Glycosidase | 48 | Probability: 0.993 AA1: 22 AA2: 23 |
| 255, 256 | Glycosidase | 48 | Probability: 0.993 AA1: 22 AA2: 23 |
| 257, 258 | Glycosidase | 48 | Probability: 0.993 AA1: 22 AA2: 23 |
| 259, 260 | Glycosidase | 48 | Probability: 0.993 AA1: 22 AA2: 23 |
| 261, 262 | Glycosidase | 5 | Probability: 0.999 AA1: 24 AA2: 25 |
| 263, 264 | Glycosidase | 48 | Probability: 0.993 AA1: 22 AA2: 23 |
| 265, 266 | Glycosidase | | Probability: 0.953 AA1: 20 AA2: 21 |
| 267, 268 | Glycosidase | 6 | Probability: 1.000 AA1: 19 AA2: 20 |
| 269, 270 | Glycosidase | 5 | |
| 27, 28 | Glycosidase | 7 | |
| 271, 272 | Glycosidase | 5 | Probability: 0.994 AA1: 18 AA2: 19 |
| 273, 274 | Glycosidase | 5 | Probability: 1.000 AA1: 23 AA2: 24 |
| 275, 276 | Glycosidase | 5 | Probability: 0.997 AA1: 19 AA2: 20 |
| 277, 278 | Glycosidase | 5 | |
| 279, 280 | Glycosidase | 5 | Probability: 1.000 AA1: 22 AA2: 23 |
| 281, 282 | Glycosidase | 6 | Probability: 0.999 AA1: 18 AA2: 19 |
| 283, 284 | Glycosidase | 5 | |
| 285, 286 | Glycosidase | 5 | Probability: 1.000 AA1: 24 AA2: 25 |
| 287, 288 | Glycosidase | 5 | |
| 289, 290 | Glycosidase | 5 | Probability: 0.976 AA1: 18 AA2: 19 |
| 29, 30 | Glycosidase | 7 | Probability: 0.981 AA1: 25 AA2: 26 |
| 291, 292 | Glycosidase | 9 | |
| 293, 294 | Glycosidase | 9 | |
| 295, 296 | Glycosidase | 9 | |
| 297, 298 | Glycosidase | 9 | Probability: 0.907 AA1: 23 AA2: 24 |
| 299, 300 | Glycosidase | 9 | Probability: 0.627 AA1: 31 AA2: 32 |
| 3, 4 | Glycosidase | 6 | Probability: 1.000 AA1: 29 AA2: 30 |
| 301, 302 | Glycosidase | 9 | Probability: 0.752 AA1: 30 AA2: 31 |
| 303, 304 | Glycosidase | 9 | Probability: 0.991 AA1: 24 AA2: 25 |
| 305, 306 | Glycosidase | 5 | Probability: 0.986 AA1: 22 AA2: 23 |
| 307, 308 | Glycosidase | 5 | Probability: 0.985 AA1: 22 AA2: 23 |
| 309, 310 | Glycosidase | 9 | |
| 31, 32 | Glycosidase | 7 | Probability: 0.999 AA1: 21 AA2: 22 |
| 311, 312 | Glycosidase | 5 | Probability: 0.986 AA1: 22 AA2: 23 |
| 313, 314 | Glycosidase | 45 | Probability: 0.788 AA1: 16 AA2: 17 |
| 315, 316 | Glycosidase | 6 | Probability: 1.000 AA1: 30 AA2: 31 |
| 317, 318 | Glycosidase | 6 | Probability: 1.000 AA1: 25 AA2: 26 |
| 319, 320 | Glycosidase | 6 | Probability: 1.000 AA1: 25 AA2: 26 |
| 321, 322 | Glycosidase | 6 | Probability: 1.000 AA1: 25 AA2: 26 |
| 323, 324 | Glycosidase | 6 | Probability: 0.984 AA1: 27 AA2: 28 |
| 325, 326 | Glycosidase | 6 | Probability: 0.984 AA1: 27 AA2: 28 |
| 327, 328 | Glycosidase | 6 | Probability: 0.984 AA1: 27 AA2: 28 |
| 329, 330 | Glycosidase | 6 | Probability: 0.984 AA1: 27 AA2: 28 |
| 33, 34 | Glycosidase; | 7 | Probability: 0.994 AA1: 20 AA2: 21 |
| | Cellobiohydrolase | | |
| 331, 332 | Glycosidase | 6 | Probability: 0.984 AA1: 27 AA2: 28 |
| 333, 334 | Glycosidase | 6 | Probability: 1.000 AA1: 25 AA2: 26 |
| 335, 336 | Glycosidase | 6 | Probability: 1.000 AA1: 25 AA2: 26 |
| 337, 338 | Glycosidase | 9 | |
| 339, 340 | Glycosidase | 9 | Probability: 0.992 AA1: 21 AA2: 22 |
| 341, 342 | Glycosidase | 6 | Probability: 0.993 AA1: 19 AA2: 20 |
| 343, 344 | Glycosidase | 6 | Probability: 0.993 AA1: 19 AA2: 20 |
| 345, 346 | Glycosidase | 6 | |
| 347, 348 | Glycosidase | 45 | Probability: 0.939 AA1: 23 AA2: 24 |
| 349, 350 | Glycosidase | 6 | Probability: 1.000 AA1: 42 AA2: 43 |
| 35, 36 | Endoglucanase | 6 | Probability: 1.000 AA1: 19 AA2: 20 |
| 351, 352 | Glycosidase | 6 | Probability: 1.000 AA1: 28 AA2: 29 |
| 353, 354 | Glycosidase | 6 | |
| 355, 356 | Glycosidase | 7 | Probability: 0.999 AA1: 17 AA2: 18 |
| 357, 358 | Glycosidase | 6 | Probability: 0.964 AA1: 16 AA2: 17 |
| 359, 360 | Glycosidase; | 7 | Probability: 0.995 AA1: 23 AA2: 24 |
| | Cellobiohydrolase | | |
| 361, 362 | Glycosidase | 9 | Probability: 1.000 AA1: 27 AA2: 28 |
| 363, 364 | Glycosidase | 8 | Probability: 1.000 AA1: 25 AA2: 26 |
| 365, 366 | Glycosidase | 8 | Probability: 0.996 AA1: 21 AA2: 22 |
| 367, 368 | Glycosidase | 9 | Probability: 1.000 AA1: 32 AA2: 33 |
| 369-371 | | 7 | |
| 37, 38 | Glycosidase | 48 | Probability: 1.000 AA1: 27 AA2: 28 |
| 372-374 | | 6 | |
| 375-377 | | 6 | |
| 378-380 | | 6 | |
| 381-383 | | 6 | |
| 384-386 | | 6 | |
| 387-389 | | 6 | |
| 39, 40 | Glycosidase | 48 | |
| 390-392 | | 6 | |
| 393-395 | | 6 | |
| 396-398 | | 6 | |
| 399-401 | | 6 | |
| 402-404 | | 6 | |
| 405-407 | | 6 | |
| 408-410 | | 6 | |
| 41, 42 | Glycosidase | 5 | Probability: 1.000 AA1: 21 AA2: 22 |
| 411-413 | | 6 | |
| 414-416 | | 6 | |
| 417-419 | | 6 | |
| 420-422 | | 6 | |
| 423, 424 | β-glucosidase | | |
| 425, 426 | | | |
| 427, 428 | Alkaline | | 1-30 |
| | endoglucanase/cellulase | | |
| 429, 430 | | | Probability: 1.000 AA1: 29 AA2: 30 |
| 43, 44 | Glycosidase | 9 | Probability: 0.972 AA1: 65 AA2: 66 |
| 431, 432 | Glycosidase | | Probability: 0.998 AA1: 21 AA2: 22 |
| 433, 434 | Glycosidase | | |
| 435, 436 | Glycosidase | | |
| 437, 438 | Glycosidase | | |
| 439, 440 | Glycosidase | | |
| 441, 442 | Glycosidase | | Probability: 1.000 AA1: 26 AA2: 27 |
| 443, 444 | Glycosidase | | |
| 445, 446 | Glycosidase | | Probability: 1.000 AA1: 23 AA2: 24 |
| 447, 448 | Glycosidase | | |
| 449, 450 | | | Probability: 0.987 AA1: 28 AA2: 29 |
| 45, 46 | Glycosidase | | |
| 451, 452 | Esterase | | Probability: 1.000 AA1: 26 AA2: 27 |
| 453, 454 | Glycosidase | | |
| 455, 456 | Binding | | |
| 457, 458 | Binding | | Probability: 1.000 AA1: 19 AA2: 20 |
| 459, 460 | | | Probability: 1.000 AA1: 30 AA2: 31 |
| 461, 462 | Glycosidase | | |
| 463, 464 | | | Probability: 0.999 AA1: 24 AA2: 25 |
| 465, 466 | | | Probability: 1.000 AA1: 29 AA2: 30 |
| 467, 468 | | | Probability: 1.000 AA1: 34 AA2: 35 |
| 469, 470 | | | Probability: 0.985 AA1: 39 AA2: 40 |
| 47, 48 | Glycosidase | 9 | Probability: 1.000 AA1: 32 AA2: 33 |
| 471, 472 | | | Probability: 0.999 AA1: 22 AA2: 23 |
| 489, 490 | Endoglucanase | | |
| 49, 50 | Glycosidase | 5 | Probability: 1.000 AA1: 25 AA2: 26 |
| 491, 492 | Endoglucanase | | Probability: 1.000 AA1: 18 AA2: 19 |
| 493, 494, 707 | Endoglucanase | | Probability: 1.000 AA1: 18 AA2: 19 |
| 495, 496, 710 | Endoglucanase | | Probability: 1.000 AA1: 18 AA2: 19 |
| 497, 498, 711 | Endoglucanase | | Probability: 0.990 AA1: 15 AA2: 16 |
| 499, 500, 712 | Endoglucanase | | Probability: 1.000 AA1: 19 AA2: 20 |
| 5, 6 | Glycosidase | 6 | Probability: 1.000 AA1: 42 AA2: 43 |
| 501, 502, 713 | Endoglucanase | | Probability: 1.000 AA1: 16 AA2: 17 |
| 503, 504, 714 | Endoglucanase | | Probability: 0.999 AA1: 19 AA2: 20 |
| 505, 506, 715 | Endoglucanase | | Probability: 0.996 AA1: 16 AA2: 17 |
| 507, 508, 716 | Endoglucanase | | Probability: 1.000 AA1: 18 AA2: 19 |
| 509, 510, 717 | Endoglucanase | | Probability: 0.995 AA1: 16 AA2: 17 |
| 51, 52 | Glycosidase | 9 | Probability: 1.000 AA1: 20 AA2: 21 |
| 511, 512, 708 | Endoglucanase | | Probability: 0.977 AA1: 19 AA2: 20 |
| 513, 514, 709 | Endoglucanase | | Probability: 1.000 AA1: 19 AA2: 20 |
| 515, 516 | Glycosidase | | Probability: 1.000 AA1: 25 AA2: 26 |
| 517, 518 | Endoglucanase | | Probability: 0.977 AA1: 19 AA2: 20 |
| 519, 520 | Endoglucanase | | Probability: 0.999 AA1: 16 AA2: 17 |
| 521, 522 | Glycosidase | | Probability: 0.994 AA1: 18 AA2: 19 |
| 523, 524 | Cellobiohydrolase | | Probability: 0.965 AA1: 16 AA2: 17 |
| 525, 526 | β-glucosidase | | Probability: 0.989 AA1: 27 AA2: 28 |
| 527, 528 | B-glucosidase | | |
| 529, 530 | B-glucosidase | | |
| 53, 54 | Glycosidase | 5 | Probability: 0.995 AA1: 23 AA2: 24 |
| 531, 532 | B-glucosidase | | |
| 533, 534 | B-glucosidase | | |
| 535, 536 | B-glucosidase | | |
| 537, 538 | β-glucosidase | | |
| 539, 540 | B-glucosidase | | |
| 541, 542 | B-glucosidase | | |
| 543, 544 | B-glucosidase | | |
| 545, 546 | B-glucosidase | | |
| 547, 548 | B-glucosidase | | |
| 549, 550 | ORF 012 - family 1 (β- | | |
| | glucosidase) | | |
| 55, 56 | Glycosidase | 5 | Probability: 0.976 AA1: 34 AA2: 35 |
| 551, 552 | β-glucosidase | | |
| 553, 554 | B-glucosidase | | |
| 555, 556 | β-glucosidase | | |
| 557, 558 | B-glucosidase | | |
| 559, 560 | β-glucosidase | | |
| 561, 562 | B-glucosidase | | |
| 563, 564 | B-glucosidase | | |
| 565, 566 | B-glucosidase | | |
| 567, 568 | β-glucosidase | | |
| 569, 570 | B-glucosidase | | |
| 57, 58 | Glycosidase | 9 | Probability: 1.000 AA1: 32 AA2: 33 |
| 571, 572 | β-glucosidase | | |
| 573, 574 | β-glucosidase | | |
| 575, 576 | B-glucosidase | | |
| 577, 578 | β-glucosidase | | |
| 579, 580 | B-glucosidase | | |
| 581, 582 | β-glucosidase | | |
| 583, 584 | B-glucosidase | | Probability: 1.000 AA1: 33 AA2: 34 |
| 585, 586 | B-glucosidase | | Probability: 1.000 AA1: 22 AA2: 23 |
| 587, 588 | B-glucosidase | | Probability: 1.000 AA1: 26 AA2: 27 |
| 589, 590 | β-glucosidase | | Probability: 1.000 AA1: 25 AA2: 26 |
| 59, 60 | Glycosidase | 45 | Probability: 1.000 AA1: 21 AA2: 22 |
| 591, 592 | β-glucosidase | | Probability: 1.000 AA1: 23 AA2: 24 |
| 593, 594 | β-glucosidase | | Probability: 0.986 AA1: 29 AA2: 30 |
| 595, 596 | β-glucosidase | | Probability: 1.000 AA1: 27 AA2: 28 |
| 597, 598 | Glycosidase | | Probability: 0.950 AA1: 16 AA2: 17 |
| 599, 600 | 0 | | Probability: 0.997 AA1: 20 AA2: 21 |
| 601, 602 | Glycosidase | | Probability: 0.994 AA1: 18 AA2: 19 |
| 603, 604 | Cellobiohydrolase | | Probability: 0.965 AA1: 16 AA2: 17 |
| 605, 606 | Cellobiohydrolase | | Probability: 1.000 AA1: 27 AA2: 28 |
| 607, 608 | Cellobiohydrolase | | Probability: 0.997 AA1: 17 AA2: 18 |
| 609, 610 | Glycosidase | | Probability: 0.998 AA1: 17 AA2: 18 |
| 61, 62 | Glycosidase | 9 | Probability: 1.000 AA1: 30 AA2: 31 |
| 611, 612 | Glycosidase | | Probability: 1.000 AA1: 28 AA2: 29 |
| 613, 614 | Glycosidase | | |
| 615, 616 | Glycosidase | | Probability: 0.952 AA1: 17 AA2: 18 |
| 617, 618 | Cellobiohydrolase | | Probability: 1.000 AA1: 18 AA2: 19 |
| 619, 620 | Cellobiohydrolase | | Probability: 1.000 AA1: 18 AA2: 19 |
| 621, 622 | Xylosidase | | Probability: 1.000 AA1: 34 AA2: 35 |
| 623, 624 | Ferulic acid esterase | | Probability: 1.000 AA1: 18 AA2: 19 |
| | (FAE) | | |
| 625, 626 | Xylosidase | | Probability: 0.998 AA1: 25 AA2: 26 |
| 627, 628 | xylanase | | |
| 629, 630 | xylanase | | |
| 63, 64 | Glycosidase | 9 | Probability: 1.000 AA1: 32 AA2: 33 |
| 631, 632 | Oligomerase/Xylosidase | | |
| 633, 634 | B-glucosidase | | |
| 635, 636 | Xylosidase | | |
| 637, 638 | Endoglucanase | | Probability: 0.996 AA1: 19 AA2: 20 |
| 639, 640 | Ferulic acid esterase | | Probability: 0.997 AA1: 27 AA2: 28 |
| | (FAE) | | |
| 641, 642 | Ferulic acid esterase | | Probability: 1.000 AA1: 41 AA2: 42 |
| | (FAE) | | |
| 643, 644 | Ferulic acid esterase | | Probability: 0.997 AA1: 23 AA2: 24 |
| | (FAE) | | |
| 645, 646 | β-glucosidase/Xylosidase | | |
| 647, 648 | a-glucuronidase | | Probability: 1.000 AA1: 21 AA2: 22 |
| 649, 650 | Acetyl xylan esterase | | |
| 65, 66 | Glycosidase | 5 | Probability: 1.000 AA1: 29 AA2: 30 |
| 651, 652 | a-glucuronidase | | Probability: 0.993 AA1: 17 AA2: 18 |
| 653, 654 | a-glucuronidase | | Probability: 0.972 AA1: 25 AA2: 26 |
| 655, 656 | Xylosidase | | |
| 657, 658 | Ferulic acid esterase | | Probability: 0.975 AA1: 28 AA2: 29 |
| | (FAE) | | |
| 659, 660 | arabinofuranosidase | | |
| 661, 662 | arabinofuranosidase | | |
| 663, 664 | xylanase | | |
| 665, 666 | Endoglucanase | | |
| 667, 668 | a-glucuronidase | | |
| 669, 670 | Xylosidase | | |
| 67, 68 | Glycosidase | 5 | Probability: 1.000 AA1: 32 AA2: 33 |
| 671, 672 | Xylosidase | | |
| 673, 674 | arabinofuranosidase | | |
| 675, 676 | arabinofuranosidase | | |
| 677, 678 | arabinofuranosidase | | Probability: 1.000 AA1: 24 AA2: 25 |
| 679, 680 | a-glucuronidase | | |
| 681, 682 | arabinofuranosidase | | |
| 683, 684 | arabinofuranosidase | | Probability: 1.000 AA1: 22 AA2: 23 |
| 685, 686 | arabinofuranosidase | | Probability: 0.999 AA1: 28 AA2: 29 |
| 687, 688 | Ferulic acid esterase | | Probability: 1.000 AA1: 26 AA2: 27 |
| | (FAE) | | |
| 689, 690 | Endoglucanase | | Probability: 1.000 AA1: 19 AA2: 20 |
| 69, 70 | Glycosidase | 5 | |
| 691, 692 | Glycosidase | | Probability: 1.000 AA1: 46 AA2: 47 |
| 693, 694 | B-glucosidase | | |
| 695, 696 | Xylosidase | | |
| 697, 698 | Xylosidase | | |
| 699, 700 | Xylosidase | | |
| 7, 8 | Glycosidase | 5 | Probability: 0.993 AA1: 19 AA2: 20 |
| 71, 72 | Glycosidase | 45 | Probability: 1.000 AA1: 21 AA2: 22 |
| 718, 719 | xylanase | | Probability: 1.000 AA1: 20 AA2: 21 |
| 720, 721 | Xylosidase | | |
| 73, 74 | Glycosidase | 5 | |
| 75, 76 | Glycosidase | 9 | Probability: 1.000 AA1: 32 AA2: 33 |
| 77, 78 | Glycosidase | 5 | Probability: 0.983 AA1: 25 AA2: 26 |
| 79, 80 | Glycosidase | 5 | Probability: 1.000 AA1: 23 AA2: 24 |
| 81, 82 | Glycosidase | | |
| 83, 84 | Glycosidase | 5 | Probability: 1.000 AA1: 28 AA2: 29 |
| 85, 86 | Glycosidase | 9 | Probability: 1.000 AA1: 32 AA2: 33 |
| 87, 88 | Glycosidase | 5 | |
| 89, 90 | Glycosidase; | 5 | Probability: 0.999 AA1: 38 AA2: 39 |
| | Endoglucanase | | |
| 9, 10 | Glycosidase | 5 | Probability: 0.999 AA1: 29 AA2: 30 |
| 91, 92 | Glycosidase | 48 | Probability: 1.000 AA1: 33 AA2: 34 |
| 93, 94 | Glycosidase | 48 | Probability: 1.000 AA1: 36 AA2: 37 |
| 95, 96 | Glycosidase | 48 | Probability: 1.000 AA1: 40 AA2: 41 |
| 97, 98 | Glycosidase | 48 | Probability: 0.995 AA1: 31 AA2: 32 |
| 99, 100 | Glycosidase | 48 | Probability: 0.889 AA1: 19 AA2: 20 |

| | | Predicted EC |
|---|---|---|
| SEQ ID NO: | Predicted Signal Sequence | Number |
| 473 | | |
| 474 | | |
| 475 | | |
| 476 | | |
| 477 | | |
| 478 | | |
| 479 | | |
| 480 | | |
| 481 | | |
| 482 | | |
| 483 | | |
| 484 | | |
| 485 | | |
| 486 | | |
| 487 | | |
| 488 | | |
| 701 | | |
| 702 | | |
| 703 | | |
| 704 | | |
| 705 | | |
| 706 | | |
| 1, 2 | MSRNIRKSSFIFSLLTIIVLIASMFLQTQT | 3.2.1.91 |
| | AQA | |
| 101, 102 | MKSVLFILLVGCVLQHIHA | |
| 103, 104 | MAKRFSLIGIGLVLALGLAGGVWA | 3.2.1.4 |
| 105, 106 | | 3.2.1.4 |
| 107, 108 | MKRMSFAVSLFTFLFAVSAYS | |
| 109, 110 | | 3.2.1.4 |
| 11, 12 | MGTSLMIKSTLTGMITAVAAAVFTTSAA | 3.2.1.91 |
| | FA | |
| 111, 112 | MTAFDNAISAAKSALASA | 3.2.1.4 |
| 113, 114 | | 3.2.1.4 |
| 115, 116 | | 3.2.1.4 |
| 117, 118 | | 3.2.1.4 |
| 119, 120 | | 3.2.1.4 |
| 121, 122 | | 3.2.1.4 |
| 123, 124 | | 3.2.1.21 |
| 125, 126 | | 3.2.1.4 |
| 127, 128 | | 3.2.1.4 |
| 129, 130 | | 3.2.1.4 |
| 13, 14 | MMRTLVTSAFACLLLPLGTGQADA | |
| 131, 132 | MKKFLLCLFLPVLLAVSCPSSPA | 3.2.1.4 |
| 133, 134 | | 3.2.1.4 |
| 135, 136 | MLKMKKFKKIGIAFLAISILLTSMLSTVS | |
| | VSA | |
| 137, 138 | MAPRRRRRAVRRLLTAVTAALALPLTM | 3.2.1.8 |
| | LANGTTPAQA | |
| 139, 140 | MHPPPRRRGGVRRLLAVAVTALALPLT | |
| | MLSTGTTPARA | |
| 141, 142 | | 3.2.1.4 |
| 143, 144 | MSRKFLLFLCTLCFAVTVWPAVSCA | 3.2.1.4 |
| 145, 146 | MQRTPVIRRTRRLPAAIVLSALATFTLS | |
| | AHA | |
| 147, 148 | MKKERNFLWAGYSRRLYAMALIFVIGF | 3.2.1.4 |
| | AAAA | |
| 149, 150 | MKKIPVFLLAFLVFFAVTGCSG | 3.2.1.4 |
| 15, 16 | | 3.2.1.91 |
| 151, 152 | MQRTPVIRRIRRLPAAAIVLSALATFTIS | |
| | AHA | |
| 153, 154 | | 3.2.1.4 |
| 155, 156 | MWRYKQGGTLQRTPVIRRTRRLSAAAI | 3.2.1.4 |
| | VLSALATFAPSARA | |
| 157, 158 | | 3.2.1.4 |
| 159, 160 | MIFKKTLFFTFTFYALLLTACRSSNGGA | 3.2.1.4 |
| 161, 162 | MKKMLFAVTLFTVLSAVSVYA | 3.2.1.3 |
| 163, 164 | MSRTRTALLAAMALVAGATGSAIA | 3.2.1.91 |
| 165, 166 | MSRTRTSILAAMALVAGATGTALTAAP | 3.2.1.91 |
| | ASA | |
| 167, 168 | MTAFENAISAAKSALASA | 3.2.1.4 |
| 169, 170 | MLHKKLLECGNYHHRPIRKGRRFLKTA | 3.2.1.4 |
| | VATAAALGMLAASFMPGNYSGTSQA | |
| 17, 18 | MPRLRARTRPRRQLTALAAALSLPLGL | |
| | TAVGATTAQA | |
| 171, 172 | MRKGIKKLGSVAIAAAMTVSLISTSVYA | |
| 173, 174 | | 3.2.1.4 |
| 175, 176 | | 3.2.1.4 |
| 177, 178 | MPTQSDSKEVSVNRKRILRTASLALVM | 3.2.1.4 |
| | LALLAGGVLG | |
| 179, 180 | MLQQFNSSRWRSSVRRLSGYLTVLAA | 3.2.1.3 |
| | LLLTLVAPSARA | |
| 181, 182 | MKSNPRRETVRVRLRRGITAFAHSVVS | 3.2.1.91 |
| | PRRTHSRPATSRRSTRTLAAAAAGVLA | |
| | SALVLVGAGAAPASA | |
| 183, 184 | MNSKGAVMKFHNGLKRPATRALVAAA | 3.2.1.91 |
| | TALATMTGMVVASAGTASA | |
| 185, 186 | MGLRSASGGSKIRLRRGVVAATTAFA | 3.2.1.91 |
| | MCVMLAGVVVNQASA | |
| 187, 188 | | |
| 189, 190 | MLQQFNSSRWRSSVRRLSGYLTVLAA | 3.2.1.3 |
| | LLLTLAAPSARA | |
| 19, 20 | MNNPRILTYLLIGIVVAVLIVFA | 3.2.1.91 |
| 191, 192 | | 3.2.1.91 |
| 193, 194 | | 3.2.1.4 |
| 195, 196 | MDPGRKRITARRALTATATALALPLSM | 3.2.1.8 |
| | LATSATTARA | |
| 197, 198 | MKLVALVTAAALAGPFYA | |
| 199, 200 | MKLVALATAAALAGPFYA | |
| 201, 202 | MIVRMLALTGSVAAVGCSG | 3.2.1.91 |
| 203, 204 | MIVRMLALTGSVAAVGCSG | 3.2.1.91 |
| 205, 206 | MYSYNIANIIFYITSMKPFFTLIFMATLVNA | 3.2.1.4 |
| 207, 208 | MIKRRTVLGALPAFGLIGMQASTAAA | |
| 209, 210 | MTSHRQSARLAVFTVLLLLLMAAPAFV | 3.2.1.91 |
| | MA | |
| 21, 22 | MKKVSNARVLSFLLILVLIFGNLASVFA | 3.2.1.4 |
| 211, 212 | | 3.2.1.4 |
| 213, 214 | | 3.2.1.4 |
| 215, 216 | MSGRAMPPRPAWFAAALLAVACIIPPA | 3.2.1.91 |
| | PA | |
| 217, 218 | MTLKHASSLIRGLSLWRGALGVLAVSL | |
| | SLAACGGGAQT | |
| 219, 220 | MTLKHASSLIRGLSLWRGALGVLAVSL | |
| | SLAACGGGAQT | |
| 221, 222 | MSRTRTSLVAALALVAGTSGTVLLSAP | 3.2.1.91 |
| | AGA | |
| 223, 224 | MSRTRTSLVAALALVAGTSGTVLLSAP | 3.2.1.91 |
| | AGA | |
| 225, 226 | MLAALALLGGTSAAALVSAPAGA | 3.2.1.91 |
| 227, 228 | MSRTKTSLLAALALLGGTSAAALVSAP | 3.2.1.91 |
| | AGA | |
| 229, 230 | MSRTKTSLLAALALLGGTSAAALVSAP | 3.2.1.91 |
| | AGA | |
| 23, 24 | MKRTRYGVRSPRSAPRFGVLFGAAAA | |
| | GVLMTGA | |
| 231, 232 | MEYKFFALVAVSASVLASSAFA | |
| 233, 234 | MKKLILCLLFPMLLAFCHSASV | 3.2.1.4 |
| 235, 236 | MTLKHASSLIRGLSLWRGALGVLAVSL | |
| | SLAACGGAQT | |
| 237, 238 | MTLKHASSLIRGLSLWRGALGVLAVSL | 3.2.1.91 |
| | SLAACGGAQT | |
| 239, 240 | MTLKHASSLIRGLSLWRGALGVLAVSL | |
| | SLAACGGAQT | |
| 241, 242 | MSRHYYARGAMLLALLTMIGGLLTTQNA | 3.2.1.8 |
| 243, 244 | MRNAIFVIGGIALSVSALG | 3.2.1.91 |
| 245, 246 | MLHRTPVIRRNRRLSAAAVVLSALAAF | 3.2.1.4 |
| | TLNAHA | |
| 247, 248 | MSFFFAQIKILTLTLPPYILIGKAVTAAIH | 3.2.1.4 |
| | PPKGGTLQRTPVIRRNSRLSAAAVVLS | |
| | ALATFTIGAHA | |
| 249, 250 | MKKFFKLIGIITLAAIIGFTMA | 3.2.1.4 |
| 25, 26 | MTRRSIVRSSSNKWLVLAGAALLACTA | 3.2.1.91 |
| | LG | |
| 251, 252 | MKKMLFAFALFTVFFAVSVYA | 3.2.1.3 |
| 253, 254 | MKRLPILTILAIFVFSILPLSA | 3.2.1.4 |
| 255, 256 | MKRLPILTILAIFVFSILPLSA | 3.2.1.4 |
| 257, 258 | MKRLPILTILAIFVFSILPLSA | 3.2.1.4 |
| 259, 260 | MKRLPILTILAIFVFSILPLSA | 3.2.1.4 |
| 261, 262 | MTKRKNSKWKIVIACIVVVLLVVA | 3.2.1.4 |
| 263, 264 | MKRLPILTILAIFVFSILPLSA | 3.2.1.4 |
| 265, 266 | MRKLSLLTASLIFWAIFSIS | |
| 267, 268 | MQRISGLAAALLLANIASA | 3.2.1.91 |
| 269, 270 | | 3.2.1.4 |
| 27, 28 | | |
| 271, 272 | MKKIIFLFAAVFIFSCTS | 3.2.1.4 |
| 273, 274 | MGKIKAFAAVAALSLAVAGNLWA | 3.2.1.4 |
| 275, 276 | MKKIIILFAAAVLFSCTSS | 3.2.1.4 |
| 277, 278 | | 3.2.1.4 |
| 279, 280 | MKKIFILFAAAVLAGCSTSETA | 3.2.1.4 |
| 281, 282 | MTVYQLLFTAALAGTALA | 3.2.1.91 |
| 283, 284 | | 3.2.1.4 |
| 285, 286 | MRKKSTLSLVGAAVALVCASAAVA | 3.2.1.4 |
| 287, 288 | | 3.2.1.4 |
| 289, 290 | MKKILILFAAAVLFYCTS | 3.2.1.4 |
| 29, 30 | MSAALSYRIYKNALLFTAFLTAARA | |
| 291, 292 | | 3.2.1.4 |
| 293, 294 | | 3.2.1.4 |
| 295, 296 | | 3.2.1.4 |
| 297, 298 | MIFYILPMKPFLTLIFMATLLNA | 3.2.1.4 |
| 299, 300 | MTLSRGPPAIFYILSMKPFFALIFMVTLV | 3.2.1.4 |
| | NA | |
| 3, 4 | MRLKTLATATAAAAVVAGTAVLWPGSA | 3.2.1.91 |
| | SA | |
| 301, 302 | MILSRGPAIFYILSMKPFFALIFMVTLVNA | 3.2.1.4 |
| 303, 304 | MKHPFALIFMAIPSLFLFTQCQNA | 3.2.1.4 |
| 305, 306 | MKKYLCLIAVFLFSCTSEIESA | 3.2.1.4 |
| 307, 308 | MKKYLCLIAVSLFSCTSEIESA | 3.2.1.4 |
| 309, 310 | | 3.2.1.4 |
| 31, 32 | MSSFQIYRAALLLSILATANA | |
| 311, 312 | MKKYLCLIAVFLFSCTSEIESA | 3.2.1.4 |
| 313, 314 | MRLFLVAVALVIAVLG | |
| 315, 316 | MTRTRTAMLAALTLVAGASGTALAAHS | 3.2.1.91 |
| | ASA | |
| 317, 318 | MMLSRRFGLALSASLLLAAGCGARA | 3.2.1.91 |
| 319, 320 | MMLSRRFGLSLSASLLLAAGCGARA | 3.2.1.91 |
| 321, 322 | MMLSRRFGLALSASLLLAAGCGARA | 3.2.1.91 |
| 323, 324 | MSTLRTVVIGLLAVGLVAGGRPAPGLA | |
| 325, 326 | MSTLRTVVIGLLAVGLVAGGRPAPGLA | |
| 327, 328 | MSTLRTVVIGLLAVGLVAGGRPAPGLA | |
| 329, 330 | MSTLRTVVIGLLAVGLVAGGRPAPGLA | |
| 33, 34 | MYQKLAAISAFLAAARAQQV | |
| 331, 332 | MSTLRTVVIGLLAVGLVAGGRPAPGLA | |
| 333, 334 | MMLSRRFGLALSASLLLAAGCGARA | 3.2.1.91 |
| 335, 336 | MMLSRRFGLALSASLLLAAGCGARA | 3.2.1.91 |
| 337, 338 | | 3.2.1.4 |
| 339, 340 | MNVSYPLFTIAITGFFFSAQA | |
| 341, 342 | MRSPVVVVAVLVGSLFATS | 3.2.1.91 |
| 343, 344 | MRSPVVVVAVLVGSLFATS | 3.2.1.91 |
| 345, 346 | | 3.2.1.91 |
| 347, 348 | MKCKYMYFFFVSLLIFACNNSNN | |
| 349, 350 | MSTLKVKQVSLVLTI LAVLVATFMGFTQ | 3.2.1.91 |
| | KSARAAAICSPATA | |
| 35, 36 | MRFPSIFTAVLFAASSALA | 3.2.1.91 |
| 351, 352 | MNPLKSLISCSPGLLGLFLLGGIHVANA | 3.2.1.91 |
| 353, 354 | | 3.2.1.91 |
| 355, 356 | MYQRALLFSALMAGATA | |
| 357, 358 | MVVGILATLATLATLA | 3.2.1.91 |
| 359, 360 | MSALNSFNMYKSALILGSLLATA | |
| 361, 362 | MKKILAFLLTVALVAVVAIPQAVVSFA | |
| 363, 364 | MKKIPLLMLLSAIIFLSLHPTLSYA | 3.2.1.14 |
| 365, 366 | MLILAVLGVYMLAMPANTVSA | |
| 367, 368 | MQRTPVIRRIRRLPAAAIVLSALATFTIS | |
| | AHA | |
| 369-371 | | |
| 37, 38 | MVKSRKISILLAVAMLVSIMIPTTAFA | |
| 372-374 | | |
| 375-377 | | |
| 378-380 | | |
| 381-383 | | |
| 384-386 | | |
| 387-389 | | |
| 39, 40 | | 3.2.1.4 |
| 390-392 | | |
| 393-395 | | |
| 396-398 | | |
| 399-401 | | |
| 402-404 | | |
| 405-407 | | |
| 408-410 | | |
| 41, 42 | MKTVLRVLFLAVAIVASVANA | 3.2.1.4 |
| 411-413 | | |
| 414-416 | | |
| 417-419 | | |
| 420-422 | | |
| 423, 424 | | 3.2.1.21 |
| 425, 426 | | 3.2.1.4 |
| 427, 428 | MSCRTLMSRRVGWGLLLWGGLFLRT | 3.2.1.4 |
| | GSVTG | |
| 429, 430 | MRKIILKFCALMMVVILIVSILQILPVFA | 3.2.1.4 |
| 43, 44 | MDLALKNLTFAAPSYILMNRPQPVAIHP | 3.2.1.4 |
| | PKGGSLQRTPVIRRNSRLSAAAAVLSA | |
| | LAAFTLSAHA | |
| 431, 432 | MKGLIAAALAGLAFGASLSWG | 3.2.1.8 |
| 433, 434 | | 3.2.1.8 |
| 435, 436 | | 3.2.1. |
| 437, 438 | | 3.2.1.4 |
| 439, 440 | | 3.2.1.8 |
| 441, 442 | MARSKRVLAWIMSSVLLISMAMPSFA | 3.2.1.8 |
| 443, 444 | | 3.2.1.8 |
| 445, 446 | MLKKLALAAGIAAATLAASGSHG | |
| 447, 448 | | 3.2.1.4 |
| 449, 450 | MALRSRLVSLAAVLATLLGGLGLSFLWQ | 3.2.1.8 |
| 45, 46 | | 3.2.1.55 |
| 451, 452 | MRHGLSLSLRAGALLCVAAFSGASHA | |
| 453, 454 | | |
| 455, 456 | | |
| 457, 458 | MRSRLAAFGALAGLTATLA | |
| 459, 460 | MRKKSVGSAVVALGVAGATLLATGSA | |
| | GSHG | |
| 461, 462 | | 3.2.1. |
| 463, 464 | MSMITPKTKSYGLAAMLSLGLAVA | 3.2.1.4 |
| 465, 466 | MKRSISIFITCLLITLLTMGGMIASPASA | 3.2.1.4 |
| 467, 468 | MKKRQGFIKKGLVLGVSLLLLALIMMSA | 3.2.1.8 |
| | TSQTSA | |
| 469, 470 | MSSFKASAINPRMAGTLTRSLYAAGFS | 3.2.1.4 |
| | LAVSTLSTQAYA | |
| 47, 48 | MQRTSVIRRIRRPVAAAAFLSALAAFTL | 3.2.1.4 |
| | SVHA | |
| 471, 472 | MVRRTRLLTLAAVLATLLGSLG | 3.2.1.4 |
| 489, 490 | | 3.2.1.4 |
| 49, 50 | MKKFFICLLLPVLLAVSCPSSPVSQ | 3.2.1.4 |
| 491, 492 | MKFQSTLLLAAAAGSALA | 3.2.1.4 |
| 493, 494, 707 | MKFQSTLLLAAAAGSALA | 3.2.1.4 |
| 495, 496, 710 | MLLQNLFAAATLAAAAFA | 3.2.1.4 |
| 497, 498, 711 | MKLLTVAALTGGALA | 3.2.1.4 |
| 499, 500, 712 | MKSLFALSLFAGLSVAQNA | 3.2.1.4 |
| 5, 6 | MSGEPHVSLRLSRPRRRTAILAAVAAC | 3.2.1.8 |
| | TVTAGAWLATGTASA | |
| 501, 502, 713 | MRNLLALFALAGPALA | 3.2.1.4 |
| 503, 504, 714 | MRSALLVVAGASLALSACA | 3.2.1.4 |
| 505, 506, 715 | MKSSVLAGIFATGAAA | 3.2.1.4 |
| 507, 508, 716 | MKFLNIILGAAAAGSALA | 3.2.1.4 |
| 509, 510, 717 | MKTSVLAGIFATGAAA | 3.2.1.4 |
| 51, 52 | MNRIAFLALVACCMPWSAQS | |
| 511, 512, 708 | MKTLSLVAVLLVQAWTASS | 3.2.1.4 |
| 513, 514, 709 | MKSLFALSLFAGLSVAQNA | 3.2.1.4 |
| 515, 516 | MKKIVSLVCVLVMLVSILGSFSVVA | 3.2.1.4 |
| 517, 518 | MKTLSLVAVLLVQAWTASS | 3.2.1.4 |
| 519, 520 | MRYDLLLAASAALALA | 3.2.1.4 |
| 521, 522 | MRYTWSVAAALLPCAIQA | 3.2.1.91 |
| 523, 524 | MSLLLTALSLVAAAKA | |
| 525, 526 | MALSTVSKVMLLTCAAVLLTIPGCNSA | 3.2.1.21 |
| 527, 528 | | 3.2.1.52 |
| 529, 530 | | 3.2.1.21 |
| 53, 54 | MKKLFGLSGIITIAAIIGFSIAA | 3.2.1.4 |
| 531, 532 | | 3.2.1.21 |
| 533, 534 | | 3.2.1.21 |
| 535, 536 | | 3.2.1.21 |
| 537, 538 | | 3.2.1.21 |
| 539, 540 | | 3.2.1.21 |
| 541, 542 | | 3.2.1.21 |
| 543, 544 | | 3.2.1.21 |
| 545, 546 | | 3.2.1.21 |
| 547, 548 | | 3.2.1.21 |
| 549, 550 | | 3.2.1.21 |
| 55, 56 | MILLKKEAFMRKLFGSSGIITIAAIIGFSIA | 3.2.1.4 |
| | ACG | |
| 551, 552 | | 3.2.1.21 |
| 553, 554 | | 3.2.1.21 |
| 555, 556 | | 3.2.1.23 |
| 557, 558 | | 3.2.1.21 |
| 559, 560 | | 3.2.1.23 |
| 561, 562 | | 3.2.1.21 |
| 563, 564 | | 3.2.1.21 |
| 565, 566 | | 3.2.1.21 |
| 567, 568 | | |
| 569, 570 | | 3.2.1.21 |
| 57, 58 | MQRTSVIRRIRRPAGAASFLFALATFS | 3.2.1.4 |
| | MSARA | |
| 571, 572 | | 3.2.1.21 |
| 573, 574 | | 3.2.1.21 |
| 575, 576 | | 3.2.1.21 |
| 577, 578 | | 3.2.1.21 |
| 579, 580 | | 3.2.1.21 |
| 581, 582 | | 3.2.1.21 |
| 583, 584 | MLSNRRLIRTIPLGAAAYSVLLGLAGCS | 3.2.1.21 |
| | QSTVA | |
| 585, 586 | MKIRSLLLLISILLGVVSPGFG | 3.2.1.21 |
| 587, 588 | MNTGWRGSFLAVAAVSLAALATSSVA | 3.2.1.21 |
| 589, 590 | MTDRDVSRRALLSLAAVAAATPAVA | 3.2.1.21 |
| 59, 60 | MKKMFFAVAMLVMFFAVGAYA | |
| 591, 592 | MNRRELLASTLAFSAASALPAAA | 3.2.1.21 |
| 593, 594 | MNCTLKPMARVVAGCVATLALAACGS | 3.2.1.21 |
| | DTG | |
| 595, 596 | MSLFRPHPLKTALATVLLGALTGQALA | 3.2.1.21 |
| 597, 598 | MIVGILTTLATLATLA | 3.2.1.91 |
| 599, 600 | MYRKLAVISAFLAAARAQQV | |
| 601, 602 | MRYTWSVAAALLPCAIQA | 3.2.1.91 |
| 603, 604 | MSLLLTALSLVAAAKA | |
| 605, 606 | MKGSISYQIYKGALLLSSLLASVSAQG | |
| 607, 608 | MLTLAFLSLLAAANAQK | |
| 609, 610 | MHQRALLFSAFWTAVQA | |
| 61, 62 | MQKTPVIQPIRRPATAALVLAAALAVSA | |
| | RA | |
| 611, 612 | MLIRLAAAGALLLGAVFVAVSPAAAATA | 3.2.1.8 |
| 613, 614 | | 3.2.1.4 |
| 615, 616 | MYRVIATASALIATARA | |
| 617, 618 | MFSKTALLSSIFAAAATA | |
| 619, 620 | MQRTSAWALLLLAQIATA | 3.2.1.91 |
| 621, 622 | MHHDSNDTTSTRRRFLATVAAAGAAG | 3.2.1.21 |
| | ATSNLAFA | |
| 623, 624 | MKRLLCSLLLALSLVTYA | 3.5.2.6 |
| 625, 626 | MKKRAFSFSLCVAIISTFWLPVAHM | 3.2.1.21 |
| 627, 628 | | 3.2.1.8 |
| 629, 630 | | 3.2.1.8 |
| 63, 64 | MPKTPVIRRIRRHVAVAAFLSALAAFAA | 3.2.1.4 |
| | SARA | |
| 631, 632 | | 3.2.1.21 |
| 633, 634 | | 3.2.1.21 |
| 635, 636 | | 3.2.1.55 |
| 637, 638 | KVTRSSAAMLLLNGAVSVA | 3.2.1.4 |
| 639, 640 | MNAAQLLSAITGSVTVLALLAQAPARA | 3.1.1.73 |
| 641, 642 | MPKTSTTDPWRAIRTRAQRTVRLLAG | |
| | GSLLSLALTGAPALA | |
| 643, 644 | MHKFISMGAFSVVAIACSSLLMG | 3.1.1. |
| 645, 646 | | 3.2.1.21 |
| 647, 648 | MRLFAAFCLLLTALLATPAVA | 3.2.1.139 |
| 649, 650 | | 3.1.1.73 |
| 65, 66 | MYRYSLTFLFLLSSFFVLAMSCPSSPV | 3.2.1.4 |
| | SQ | |
| 651, 652 | MRLLFTTLLWAVGGALA | 3.2.1.139 |
| 653, 654 | MKNVQSFYLKALFAALFLFSLWLKA | 3.2.1.139 |
| 655, 656 | | |
| 657, 658 | MNHFASKSLRMAWQPGLLATTVLPLA | 3.2.1.8 |
| | AA | |
| 659, 660 | | 3.2.1.55 |
| 661, 662 | | 3.2.1.55 |
| 663, 664 | | 3.2.1.8 |
| 665, 666 | | |
| 667, 668 | | 3.2.1.3 |
| 669, 670 | | 3.2.1.21 |
| 67, 68 | MSKKHSNHVNARSFLSTAAMILIGATLF | 3.2.1.4 |
| | GANA | |
| 671, 672 | | 3.2.1.37 |
| 673, 674 | | 3.2.1.55 |
| 675, 676 | | 3.2.1.55 |
| 677, 678 | MFDRVARGALALAVTCAFVLPAEA | 3.2.1.55 |
| 679, 680 | | 3.2.1.8 |
| 681, 682 | | 3.2.1.21 |
| 683, 684 | MKSIKHIAAAAALGLAVLTASA | 3.2.1.55 |
| 685, 686 | MTSGRNTCVCLLLIVLAIGLLSKPPASA | 3.2.1.55 |
| 687, 688 | MLRPASLFALGALLFLSLLDSVSAAT | |
| 689, 690 | MRFPSIFTAVLFAASSALA | 3.2.1.91 |
| 69, 70 | | 3.2.1.4 |
| 691, 692 | MSVTEPPPRRRGRHSRARRFLTSLGA | 3.2.1.4 |
| | TAALTAGMLGVPLATGTAHA | |
| 693, 694 | | 3.2.1.21 |
| 695, 696 | | |
| 697, 698 | | |
| 699, 700 | | |
| 7, 8 | MKSVLALALIVSINLVLLA | 3.2.1.4 |
| 71, 72 | MKKMFFAVALCVVFLAVGAHA | |
| 718, 719 | MKRPLVNLLTTACLLVAANA | 3.2.1.8 |
| 720, 721 | | |
| 73, 74 | | 3.2.1.4 |
| 75, 76 | MQRTPVIRRTRRLSAAAIVLSALAAFAP | 3.2.1.4 |
| | SARA | |
| 77, 78 | MKKVILILPLVILFALMDCTSSVNK | 3.2.1.4 |
| 79, 80 | MKKFLLCLLVPVLLAVSCPSSPA | 3.2.1.4 |
| 81, 82 | | 3.2.1.55 |
| 83, 84 | MNFRKKLLFTFIIYTLLLTFCRSSNGEA | 3.2.1.4 |
| 85, 86 | MQRTPVIRRTRRLSAAAIVLSALAAFAP | 3.2.1.4 |
| | SARA | |
| 87, 88 | | 3.2.1.4 |
| 89, 90 | MFFVKDFCKGEGNVKKIVSLVCVLVML | 3.2.1.4 |
| | VSILGSFSVVA | |
| 9, 10 | MREIILKSGALLMVVILIVSILQILTVFA | 3.2.1.4 |
| 91, 92 | MKGEEERMVKRKISVLLAAAMLVSALT | |
| | PMTAFA | |
| 93, 94 | MRLKKLKNAVVATGLALGMLSTTALSA | 3.2.1.4 |
| | LNFTTTSLA | |
| 95, 96 | MPKMMKLSLIKKPISIMMATVLFLSLTT | 3.2.1.4 |
| | GLFNFRPQTAHA | |
| 97, 98 | MILNRWRPRSACAMKWGSLIVAAFVST | |
| | GAIG | |
| 99, 100 | MKSVLFILLVGCVLQHIHA | |

TABLE 3

| SEQ ID NO: | NR Description | NR Accession Code | NR Evalue | NR Organism | Geneseq Protein Description |
|---|---|---|---|---|---|
| 1, 2 | glycoside hydrolase, family 6 [Herpetosiphon | 113938252 | 1.00E−106 | Herpetosiphon | Vibrio harveyi endoglucanase DNA. |
| | aurantiacus ATCC 23779] | | | aurantiacus ATCC | |
| | gi\|113900042\|gb\|EAU19035.1\|glycoside hydrolase, family 6 | | | 23779 | |
| | [Herpetosiphon aurantiacus ATCC 23779] | | | | |
| 3, 4 | Endoglucanase A precursor (endo-1,4-beta-glucanase) | 121805 | 1.00E−139 | Thermobispora | Amino acid sequence of a gene down- |
| | (cellulase). | | | bispora | regulated during carbon starvation. |
| 5, 6 | endo-beta-1,4-glucanase; McenA [Micromonospora | 1009722 | 1.00E−169 | Micromonospora | M. xanthus protein seq., seq id 9726. |
| | cellulolyticum]. | | | cellulolyticum | |
| 7, 8 | cellulase (EC 3.2.1.4), alkaline - Bacillus sp. (strain KSM-S237). | 25336830 | 0 | Bacillus sp. | Bacillus alkaline cellulase enzyme |
| | | | | | amino acid sequence - SEQ ID 4. |
| 9, | endoglucanase [Anaerocellum thermophilum]. | 1483210 | 0 | Anaerocellum | Bacillus sp alkaline cellulase PCR primer SEQ ID 22. |
| 10 | | | | thermophilum | |
| 11, | Cellobiohydrolase A (1 4-beta-cellobiosidase A)-like | 90021917 | 0 | Saccharophagus | Vibrio harveyi endoglucanase DNA. |
| 12 | [Saccharophagus degradans 2-40] | | | degradans 2-40 | |
| 13, | Endoglucanase 1 precursor (endo-1,4-beta-glucanase 1) | 544459 | 1.00E−129 | Streptomyces halstedii | A. gossypii/S. halstedii fusion construct |
| 14 | (cellulase 1) (CMCASE I) (CEL1). | | | | containing cellulase DNA. |
| 15, | secreted cellulase [Streptomyces coelicolor A3(2)] | 21224850 | 0 | Streptomyces | Exo-cellobiohydrolase cbh1 catalytic |
| 16 | | | | coelicolor A3(2) | domain. |
| 17, | cellulose 1;4-beta-cellobiosidase [Streptomyces | 29828397 | 0 | Streptomyces | Bacterial polypeptide #10001. |
| 18 | avermitilis MA-4680] | | | avermitilis MA-4680 | |
| 19, | Cellulase [Acidothermus cellulolyticus 11B] | 88932594 | 1.00E−106 | Acidothermus | Saccharothrix australiensis endo-beta-1,4-glucanase |
| 20 | gi\|88911374\|gb\|EAR30819.1\|Cellulase [Acidothermus | | | cellulolyticus 11B | gene. |
| | cellulolyticus 11B] | | | | |
| 21, | Endoglucanase precursor (endo-1,4-beta-glucanase) | 121838 | 0 | Bacillus sp. KSM-635 | Full length Bacillus sp. alkaline |
| 22 | (alkaline cellulase) | | | | cellulase. |
| 23, | endoglucanase A precursor (Endo-1;4-beta-glucanase) | 111224344 | 3.00E−78 | Frankia alni ACN14a | Amino acid sequence of a gene down- |
| 24 | (Cellulase) [Frankia alni ACN14a] | | | | regulated during carbon starvation. |
| 25, | Cellulase [Mycobacterium sp. JLS] | 92909181 | 2.00E−69 | Mycobacterium sp. | Amino acid sequence of a gene down- |
| 26 | gi\|92913044\|ref\|ZP_01281673.1\|Cellulase | | | JLS | regulated during carbon starvation. |
| | [Mycobacterium sp. KMS] | | | | |
| | gi\|108802261\|ref\|YP_642458.1\|Cellulase | | | | |
| | [Mycobacterium sp. MCS] gi\|92433643\|gb\|EAS92976.1\| | | | | |
| | Cellulase [Mycobacterium sp. JLS] | | | | |
| | gi\|92442306\|gb\|EAT00144.1\|Cell | | | | |
| 27, | exo-cellobiohydrolase [Penicillium chrysogenum] | 55775695 | 1.00E−74 | Penicillium | Cellobiohydrolase CBH protein |
| 28 | | | | chrysogenum | fragment. |
| 29, | exo-cellobiohydrolase [Penicillium chrysogenum] | 55775695 | 0 | Penicillium | Cellobiohydrolase I activity protein SEQ |
| 30 | | | | chrysogenum | ID No 16. |
| 31, | 1,4-beta-D-glucan cellobiohydrolase B precursor | 6164684 | 0 | Aspergillus niger | Cellobiohydrolase CBH protein |
| 32 | [Aspergillus niger]. | | | | fragment. |
| 33, | Exoglucanase I precursor (Exocellobiohydrolase I) | 50400675 | 0 | | PCR primer Mcbh1-N of the |
| 34 | (CBHI) (1;4-beta-cellobiohydrolase) | | | | specification. |
| 35, | hypothetical protein SNOG_05090 [Phaeosphaeria | 111066361 | 1.00E−170 | Phaeosphaeria | PCR primer for H. insolens Cel6B |
| 36 | nodorum SN15] | | | nodorum SN15 | fungal cellulase coding sequence. |
| 37, | Glycoside hydrolase, family 48: Clostridium cellulosome | 67875068 | 0 | Clostridium | Clostridium josui cellulose degrading cellulase D |
| 38 | enzyme, dockerin type I [Clostridium thermocellum | | | thermocellum ATCC | protein. |
| | ATCC 27405] gi\|729647\|sp\|P38686\|GUNS_CLOTM | | | 27405 | |
| | Endoglucanase SS precursor (EGSS) (Endo-1,4-beta- | | | | |
| | glucanase) (Cellulase SS) gi\|289859\|gb\|AAA23226.1\| | | | | |
| | cellula | | | | |
| 39, | EXOGLUCANASE II PRECURSOR | 1708082 | 0 | Clostridium | Clostridium josui cellulose degrading |
| 40 | (EXOCELLOBIOHYDROLASE II) (1,4-BETA- | | | stercorarium | cellulase D protein. |
| | CELLOBIOHYDROLASE II) (AVICELASE II). | | | | |
| 41, | endoglucanase. | 228944 | 5.00E−59 | Prevotella ruminicola | Cow cellulase DNA clones pBKRR 2 |
| 42 | | | | | and pBKRR 16 SEQ ID NO: 3. |
| 43, | cellulase [uncultured bacterium] | 56675038 | 1.00E−118 | uncultured bacterium | X campestris umce19A cellulase gene |
| 44 | | | | | SeqID1. |
| 45, | cellulose-binding protein [Fibrobacter succinogenes]. | 1620001 | 0 | Fibrobacter | Alicyclobacillus sp. DSM 15716 |
| 46 | | | | succinogenes | functional polypeptide coding |
| | | | | | sequence. |
| 47, | endo-1;4-beta-D-glucanase [uncultured bacterium] | 78926855 | 1.00E−117 | uncultured bacterium | X campestris umce19A cellulase gene |
| 48 | | | | | SeqID1. |
| 49, | endoglucanase. | 228944 | 2.00E−71 | Prevotella ruminicola | Cow cellulase DNA clones pBKRR 2 |
| 50 | | | | | and pBKRR 16 SEQ ID NO: 3. |
| 51, | cellulase [Xanthomonas campestris pv. campestris str. | 21231824 | 0 | Xanthomonas | X campestris umce19A cellulase gene |
| 52 | ATCC 33913]. | | | campestris pv. | SeqID1. |
| | | | | campestris str. ATCC | |
| | | | | 33913 | |
| 53, | Endoglucanase A precursor (endo-1,4-beta-glucanase A) | 1708079 | 4.00E−77 | Clostridium | Amino acid sequence of a CelE |
| 54 | (cellulase A) | | | longisporum | cellulase polypeptide. |
| 55, | Endoglucanase family 5 [Clostridium acetobutylicum]. | 15894113 | 1.00E−77 | Clostridium | Amino acid sequence of a CelE |
| 56 | | | | acetobutylicum | cellulase polypeptide. |
| 57, | endo-1;4-beta-D-glucanase [uncultured bacterium] | 78926855 | 1.00E−119 | uncultured bacterium | X campestris umce19A cellulase gene |
| 58 | | | | | SeqID1. |
| 59, | hypothetical protein SNOG_11303 [Phaeosphaeria | 111059891 | 2.00E−43 | Phaeosphaeria | Endoglucanase fusion protein SEQ ID |
| 60 | nodorum SN15] | | | nodorum SN15 | NO 2B. |
| 61, | cellulase [uncultured bacterium] | 56675038 | 1.00E−119 | uncultured bacterium | X campestris umce19A cellulase gene |
| 62 | | | | | SeqID1. |
| 63, | endo-1;4-beta-D-glucanase [uncultured bacterium] | 78926855 | 1.00E−119 | uncultured bacterium | X campestris umce19A cellulase gene |
| 64 | | | | | SeqID1. |
| 65, | endoglucanase. | 228944 | 3.00E−65 | Prevotella ruminicola | P. pabuli xyloglucanase XYG1022 DNA |
| 66 | | | | | amplifying PCR primer 189585. |
| 67, | ENDOGLUCANASE B PRECURSOR (ENDO-1,4- | 121814 | 7.00E−51 | Clostridium | P. pabuli xyloglucanase XYG1022 DNA |
| 68 | BETA-GLUCANASE B) (CELLULASE B). | | | cellulovorans | amplifying PCR primer 189585. |
| 69, | cellodextrinase [uncultured bacterium] | 91766360 | 7.00E−90 | uncultured bacterium | Anti-biofilm polypeptide #7. |
| 70 | | | | | |
| 71, | endo-beta-1,4-D-glucanase [Rhizopus oryzae]. | 27530542 | 3.00E−42 | Rhizopus oryzae | Humicola insolens endoglucanase- |
| 72 | | | | | related protein. |
| 73, | cellulase [unidentified microorganism] | 82524122 | 6.00E−73 | unidentified | Cow cellulase DNA clones pBKRR 2 |
| 74 | | | | microorganism | and pBKRR 16 SEQ ID NO: 3. |
| 75, | endo-1;4-beta-D-glucanase [uncultured bacterium] | 78926855 | 1.00E−117 | uncultured bacterium | X campestris umce19A cellulase gene |
| 76 | | | | | SeqID1. |
| 77, | endo-1;4-beta-glucanase [Streptomyces avermitilis MA- | 29828396 | 4.00E−29 | Streptomyces | Orthosomycin biosynthetic polypeptide |
| 78 | 4680] | | | avermitilis MA-4680 | SEQ ID NO 273. |
| 79, | endoglucanase. | 228944 | 8.00E−73 | Prevotella ruminicola | Cow cellulase DNA clones pBKRR 2 |
| 80 | | | | | and pBKRR 16 SEQ ID NO: 3. |
| 81, | cellulose-binding protein [Fibrobacter succinogenes]. | 1620001 | 0 | Fibrobacter | Alicyclobacillus sp. DSM 15716 |
| 82 | | | | succinogenes | functional polypeptide coding |
| | | | | | sequence. |
| 83, | cellulase [unidentified microorganism] | 82524122 | 1.00E−65 | unidentified | Cow cellulase DNA clones pBKRR 2 |
| 84 | | | | microorganism | and pBKRR 16 SEQ ID NO: 3. |
| 85, | endo-1;4-beta-D-glucanase [uncultured bacterium] | 78926855 | 1.00E−117 | uncultured bacterium | X campestris umce19A cellulase gene |
| 86 | | | | | SeqID1. |
| 87, | cellulase [unidentified microorganism] | 82524122 | 2.00E−72 | unidentified | Cow cellulase DNA clones pBKRR 2 |
| 88 | | | | microorganism | and pBKRR 16 SEQ ID NO: 3. |
| 89, | Lipolytic enzyme, G-D-S-L:Glycoside hydrolase, family | 67876012 | 0 | Clostridium | Orpinomyces cellulase CelB cDNA. |
| 90 | 5:Clostridium cellulosome enzyme, dockerin type I | | | thermocellum ATCC | |
| | [Clostridium thermocellum ATCC 27405] | | | 27405 | |
| | gi\|67850336\|gb\|EAM45917.1\|Lipolytic enzyme, G-D-S- | | | | |
| | L:Glycoside hydrolase, family 5:Clostridium cellulosome | | | | |
| | enzyme | | | | |
| 91, | Glycoside hydrolase, family 48: Clostridium cellulosome | 67875068 | 0 | Clostridium | Clostridium josui cellulose degrading |
| 92 | enzyme, dockerin type I [Clostridium thermocellum | | | thermocellum ATCC | cellulase D protein. |
| | ATCC 27405] gi\|729647\|sp\|P38686\|GUNS_CLOTM | | | 27405 | |
| | Endoglucanase SS precursor (EGSS) (Endo-1,4-beta- | | | | |
| | glucanase) (Cellulase SS) gi\|289859\|gb\|AAA23226.1\| | | | | |
| | cellula | | | | |
| 93, | EXOGLUCANASE II PRECURSOR | 1708082 | 0 | Clostridium | Clostridium josui cellulose degrading |
| 94 | (EXOCELLOBIOHYDROLASE II) (1,4-BETA- | | | stercorarium | cellulase D protein. |
| | CELLOBIOHYDROLASE II) (AVICELASE II). | | | | |
| 95, | cellulose 1,4-beta-cellobiosidase [Paenibacillus sp. BP- | 21449824 | 0 | Paenibacillus sp. BP- | Clostridium josui cellulose degrading |
| 96 | 23]. | | | 23 | cellulase D protein. |
| 97, | glycoside hydrolase, family 48 [Herpetosiphon | 113939770 | 0 | Herpetosiphon | Clostridium josui cellulose degrading |
| 98 | aurantiacus ATCC 23779] | | | aurantiacus ATCC | cellulase D protein. |
| | gi\|113898624\|gb\|EAU17637.1\|glycoside hydrolase, | | | 23779 | |
| | family 48 [Herpetosiphon aurantiacus ATCC 23779] | | | | |
| 99, | active phase-associated protein II [Gastrophysa | 95113612 | 0 | Gastrophysa | Exo-cellobiohydrolase cbh1 catalytic |
| 100 | atrocyanea] | | | atrocyanea | domain. |
| 101, | active phase-associated protein II [Gastrophysa | 95113612 | 0 | Gastrophysa | Exo-cellobiohydrolase cbh1 catalytic |
| 102 | atrocyanea] | | | atrocyanea | domain. |
| 103, | Cellulase [Saccharophagus degradans 2-40] | 90022881 | 1.00E−55 | Saccharophagus | Microbulbifer degradans cellulase |
| 104 | | | | degradans 2-40 | system protein - SEQ ID 8. |
| 105, | ENDOGLUCANASE A PRECURSOR (ENDO-1,4- | 1708079 | 5.00E−75 | Clostridium | Amino acid sequence of a CelE |
| 106 | BETA-GLUCANASE A) (CELLULASE A). | | | longisporum | cellulase polypeptide. |
| 107, | hypothetical protein SNOG_11303 [Phaeosphaeria | 111059891 | 2.00E−43 | Phaeosphaeria | Glycosyl hydrolase family 11 xylanase |
| 108 | nodorum SN15] | | | nodorum SN15 | second conserved sequence. |
| 109, | endoglucanase 3. | 666885 | 4.00E−34 | Fibrobacter intestinalis | Glucose isomerase SEQ ID NO 20. |
| 110 | | | | | |
| 111, | endoglucanase - Clostridium cellulovorans. | 98588 | 4.00E−84 | Clostridium | Amino acid sequence of a CelE |
| 112 | | | | cellulovorans | cellulase polypeptide. |
| 113, | Endoglucanase family 5 [Clostridium acetobutylicum]. | 15894113 | 2.00E−68 | Clostridium | Amino acid sequence of a CelE |
| 114 | | | | acetobutylicum | cellulase polypeptide. |
| 115, | ENDOGLUCANASE A PRECURSOR (ENDO-1,4- | 1708078 | 1.00E−116 | Caldicellulosiruptor | A. cellulolyticus Gux1 protein FN_III |
| 116 | BETA-GLUCANASE A) (CELLULASE A). | | | saccharolyticus | domain fragment. |
| 117, | cellulase/endoglucanase [unidentified microorganism] | 82524100 | 9.00E−68 | unidentified | Cow cellulase DNA clones pBKRR 2 |
| 118 | | | | microorganism | and pBKRR 16 SEQ ID NO: 3. |
| 119, | endoglucanase. | 228944 | 3.00E−70 | Prevotella ruminicola | Cow cellulase DNA clones pBKRR 2 |
| 120 | | | | | and pBKRR 16 SEQ ID NO: 3. |
| 121, | Endoglucanase B precursor (endo-1,4-beta-glucanase) | 121789 | 6.00E−92 | Bacillus sp. (strain N-4/ | P300-CelB fusion construct 4 |
| 122 | (cellulase) | | | JCM 9156) | polypeptide product. |
| 123 | Beta-glucosidase [Pseudoalteromonas atlantica T6c] | 109897152 | 1.00E−131 | Pseudoalteromonas | Vibrio harveyi endoglucanase DNA. |
| 124 | | | | atlantica T6c | |
| 125, | cellodextrinase. | 488281 | 2.00E−96 | Fibrobacter | Vibrio harveyi endoglucanase DNA. |
| 126 | | | | succinogenes | |
| 127, | cellodextrinase. | 488281 | 1.00E−96 | Fibrobacter | Vibrio harveyi endoglucanase DNA. |
| 128 | | | | succinogenes | |
| 129, | glycoside hydrolase; family 5 [Acidobacteria bacterium | 94968716 | 5.00E−37 | Acidobacteria | Glucose isomerase SEQ ID NO 20. |
| 130 | Ellin345] | | | bacterium Ellin345 | |
| 131, | endoglucanase. | 228944 | 5.00E−72 | Prevotella ruminicola | P. pabuli xyloglucanase XYG1022 DNA |
| 132 | | | | | amplifying PCR primer 189585. |
| 133, | endoglucanase - Clostridium cellulovorans. | 98588 | 1.00E−88 | Clostridium | Amino acid sequence of a CelE |
| 134 | | | | cellulovorans | cellulase polypeptide. |
| 135, | ENDOGLUCANASE F PRECURSOR (ENDO-1,4- | 1708081 | 0 | Clostridium | Clostridium josui cellulose degrading |
| 136 | BETA-GLUCANASE F) (CELLULASE F) (EGCCF). | | | cellulolyticum | cellulase D protein. |
| 137, | cellulose 1;4-beta-cellobiosidase [Streptomyces | 29828397 | 0 | Streptomyces | Bacterial polypeptide #10001. |
| 138 | avermitilis MA-4680] | | | avermitilis MA-4680 | |
| 139, | secreted cellulase [Streptomyces coelicolor A3(2)] | 21224848 | 0 | Streptomyces | Bacterial polypeptide #10001. |
| 140 | | | | coelicolor A3(2) | |
| 141, | endoglucanase. | 228944 | 7.00E−65 | Prevotella ruminicola | Cow cellulase DNA clones pBKRR 2 |
| 142 | | | | | and pBKRR 16 SEQ ID NO: 3. |
| 143, | endoglucanase. | 228944 | 6.00E−63 | Prevotella ruminicola | Cow cellulase DNA clones pBKRR 2 |
| 144 | | | | | and pBKRR 16 SEQ ID NO: 3. |
| 145, | cellulase [uncultured bacterium] | 56675038 | 1.00E−120 | uncultured bacterium | X campestris umce19A cellulase gene |
| 146 | | | | | SeqID1. |
| 147, | endoglucanase - Clostridium cellulovorans. | 98588 | 3.00E−88 | Clostridium | Sequence of modified xylanase cDNA |
| 148 | | | | cellulovorans | in clone pNX-Tac. |
| 149, | Endoglucanase family 5 [Clostridium acetobutylicum]. | 15894113 | 1.00E−81 | Clostridium | Clostridium josui cellulose degrading |
| 150 | | | | acetobutylicum | cellulase D protein. |
| 151, | endo-1;4-beta-D-glucanase [uncultured bacterium] | 78926855 | 1.00E−119 | uncultured bacterium | X campestris umce19A cellulase gene |
| 152 | | | | | SeqID1. |
| 153, | endoglucanase - Clostridium cellulovorans. | 98588 | 4.00E−88 | Clostridium | Amino acid sequence of a CelE |
| 154 | | | | cellulovorans | cellulase polypeptide. |
| 155, | endo-1;4-beta-D-glucanase [uncultured bacterium] | 78926855 | 1.00E−118 | uncultured bacterium | X campestris umce19A cellulase gene |
| 156 | | | | | SeqID1. |
| 157, | endoglucanase - Clostridium cellulovorans. | 98588 | 4.00E−88 | Clostridium | Amino acid sequence of a CelE |
| 158 | | | | cellulovorans | cellulase polypeptide. |
| 159, | cellulase [unidentified microorganism] | 82524122 | 1.00E−68 | unidentified | Cow cellulase DNA clones pBKRR 2 |
| 160 | | | | microorganism | and pBKRR 16 SEQ ID NO: 3. |
| 161, | ENDOGLUCANASE B PRECURSOR (ENDO-1,4- | 121816 | 6.00E−49 | Pseudomonas | Acremonium sp. wild-type cellulase. |
| 162 | BETA-GLUCANASE) (CELLULASE) (EGB). | | | fluorescens | |
| 163, | secreted cellulase [Streptomyces coelicolor A3(2)] | 21224850 | 0 | Streptomyces | Thermostable cellulase-E3 catalytic |
| 164 | | | | coelicolor A3(2) | domain. |
| 165, | cellulose 1;4-beta-cellobiosidase [Streptomyces | 29828395 | 0 | Streptomyces | Thermostable cellulase-E3 catalytic |
| 166 | avermitilis MA-4680] | | | avermitilis MA-4680 | domain. |
| 167, | endoglucanase - Clostridium cellulovorans. | 98588 | 1.00E−88 | Clostridium | Amino acid sequence of a CelE |
| 168 | | | | cellulovorans | cellulase polypeptide. |
| 169, | EXOGLUCANASE II PRECURSOR | 1708082 | 0 | Clostridium | Clostridium josui cellulose degrading |
| 170 | (EXOCELLOBIOHYDROLASE II) (1,4-BETA- | | | stercorarium | cellulase D protein. |
| | CELLOBIOHYDROLASE II) (AVICELASE II). | | | | |
| 171, | ENDOGLUCANASE F PRECURSOR (ENDO-1,4- | 1708081 | 0 | Clostridium | Clostridium josui cellulose degrading |
| 172 | BETA-GLUCANASE F) (CELLULASE F) (EGCCF). | | | cellulolyticum | cellulase D protein. |
| 173, | EXOGLUCANASE II PRECURSOR | 1708082 | 0 | Clostridium | Clostridium josui cellulose degrading |
| 174 | (EXOCELLOBIOHYDROLASE II) (1,4-BETA- | | | stercorarium | cellulase D protein. |
| | CELLOBIOHYDROLASE II) (AVICELASE II). | | | | |
| 175, | EXOGLUCANASE II PRECURSOR | 1708082 | 0 | Clostridium | Clostridium josui cellulose degrading |
| 176 | (EXOCELLOBIOHYDROLASE II) (1,4-BETA- | | | stercorarium | cellulase D protein. |
| | CELLOBIOHYDROLASE II) (AVICELASE II). | | | | |
| 177, | Cellulose-binding, family II, bacterial type: Fibronectin, | 88930607 | 0 | Acidothermus | A. cellulolyticus Gux1 protein FN_III |
| 178 | type III [Acidothermus cellulolyticus 11B] | | | cellulolyticus 11B | domain fragment. |
| | gi\|88913077\|gb\|EAR32512.1\|Cellulose-binding, family | | | | |
| | II, bacterial type: Fibronectin, type III [Acidothermus | | | | |
| | cellulolyticus 11B] | | | | |
| 179, | cellulose 1;4-beta-cellobiosidase [Streptomyces | 29828397 | 0 | Streptomyces | A. cellulolyticus Gux1 protein FN_III |
| 180 | avermitilis MA-4680] | | | avermitilis MA-4680 | domain fragment. |
| 181, | cellulose 1;4-beta-cellobiosidase [Streptomyces | 29828395 | 1.00E−147 | Streptomyces | Exo-cellobiohydrolase cbh1 catalytic |
| 182 | avermitilis MA-4680] | | | avermitilis MA-4680 | domain. |
| 183, | secreted cellulase [Streptomyces coelicolor A3(2)] | 21224850 | 0 | Streptomyces | Thermostable cellulase-E3 catalytic |
| 184 | | | | coelicolor A3(2) | domain. |
| 185, | cellulose 1;4-beta-cellobiosidase [Streptomyces | 29828395 | 0 | Streptomyces | Thermostable cellulase-E3 catalytic |
| 186 | avermitilis MA-4680] | | | avermitilis MA-4680 | domain. |
| 187, | EXOGLUCANASE II PRECURSOR | 1708082 | 0 | Clostridium | Clostridium josui cellulose degrading |
| 188 | (EXOCELLOBIOHYDROLASE II) (1,4-BETA- | | | stercorarium | cellulase D protein. |
| | CELLOBIOHYDROLASE II) (AVICELASE II). | | | | |
| 189, | cellulose 1;4-beta-cellobiosidase [Streptomyces | 29828397 | 0 | Streptomyces | A. cellulolyticus Gux1 protein FN_III |
| 190 | avermitilis MA-4680] | | | avermitilis MA-4680 | domain fragment. |
| 191, | Cellulase [Frankia sp. EAN1pec] | 68235421 | 2.00E−72 | Frankia sp. EAN1pec | Amino acid sequence of a gene down- |
| 192 | gi\|68196961\|gb\|EAN11335.1\|Cellulase [Frankia sp. | | | | regulated during carbon starvation. |
| | EAN1pec] | | | | |
| 193, | glycoside hydrolase, family 48 [Herpetosiphon | 113939770 | 0 | Herpetosiphon | A. cellulolyticus Gux1 protein FN_III |
| 194 | aurantiacus ATCC 23779] | | | aurantiacus ATCC | domain fragment. |
| | gi\|113898624\|gb\|EAU17637.1\|glycoside hydrolase, | | | 23779 | |
| | family 48 [Herpetosiphon aurantiacus ATCC 23779] | | | | |
| 195, | cellulose 1;4-beta-cellobiosidase [Streptomyces | 29828397 | 0 | Streptomyces | Bacterial polypeptide #10001. |
| 196 | avermitilis MA-4680] | | | avermitilis MA-4680 | |
| 197, | secreted endoglucanase [Streptomyces coelicolor | 21221288 | 2.00E−57 | Streptomyces | Amino acid sequence of a gene down- |
| 198 | A3(2)] | | | coelicolor A3(2) | regulated during carbon starvation. |
| 199, | secreted endoglucanase [Streptomyces coelicolor | 21221288 | 4.00E−57 | Streptomyces | Amino acid sequence of a gene down- |
| 200 | A3(2)] | | | coelicolor A3(2) | regulated during carbon starvation. |
| 201, | Cellulase [Acidothermus cellulolyticus 11B] | 88932594 | 1.00E−130 | Acidothermus | M. xanthus protein sequence, seq id |
| 202 | gi\|88911374\|gb\|EAR30819.1\|Cellulase [Acidothermus | | | cellulolyticus 11B | 9726. |
| | cellulolyticus 11B] | | | | |
| 203, | Cellulase [Acidothermus cellulolyticus 11B] | 88932594 | 1.00E−130 | Acidothermus | M. xanthus protein sequence, seq id |
| 204 | gi\|88911374\|gb\|EAR30819.1\|Cellulase [Acidothermus | | | cellulolyticus 11B | 9726. |
| | cellulolyticus 11B] | | | | |
| 205, | endo-1;4-beta-D-glucanase [uncultured bacterium] | 78926927 | 1.00E−130 | uncultured bacterium | X campestris umce19A cellulase gene |
| 206 | | | | | SeqID1. |
| 207, | cellulose 1;4-beta-cellobiosidase [Streptomyces | 29828397 | 0 | Streptomyces | A. cellulolyticus Gux1 protein FN_III |
| 208 | avermitilis MA-4680] | | | avermitilis MA-4680 | domain fragment. |
| 209, | Cellulase [Acidothermus cellulolyticus 11B] | 88932594 | 1.00E−119 | Acidothermus | A. gossypii/S. halstedii fusion construct |
| 210 | gi\|88911374\|gb\|EAR30819.1\|Cellulase [Acidothermus | | | cellulolyticus 11B | containing cellulase DNA. |
| | cellulolyticus 11B] | | | | |
| 211, | endo-1;4-beta-D-glucanase [uncultured bacterium] | 78926855 | 1.00E−134 | uncultured bacterium | X campestris umce19A cellulase gene |
| 212 | | | | | SeqID1. |
| 213, | endoglucanase - Clostridium cellulovorans. | 98588 | 3.00E−87 | Clostridium | Amino acid sequence of a CelE |
| 214 | | | | cellulovorans | cellulase polypeptide. |
| 215, | Cellulase [Mycobacterium vanbaalenii PYR-1] | 90204581 | 3.00E−76 | Mycobacterium | Amino acid sequence of a gene down- |
| 216 | gi\|90196633\|gb\|EAS23395.1\|Cellulase [Mycobacterium | | | vanbaalenii PYR-1 | regulated during carbon starvation. |
| | vanbaalenii PYR-1] | | | | |
| 217, | CelA [Mycobacterium avium subsp. paratuberculosis K- | 41406378 | 6.00E−63 | Mycobacterium avium | Amino acid sequence of a gene down- |
| 218 | 10] | | | subsp. | regulated during carbon starvation. |
| | | | | paratuberculosis K-10 | |
| 219, | CelA [Mycobacterium avium subsp. paratuberculosis K- | 41406378 | 3.00E−63 | Mycobacterium avium | Amino acid sequence of a gene down- |
| 220 | 10] | | | subsp. | regulated during carbon starvation. |
| | | | | paratuberculosis K-10 | |
| 221, | cellulose 1;4-beta-cellobiosidase [Streptomyces | 29828395 | 0 | Streptomyces | Thermostable cellulase-E3 catalytic |
| 222 | avermitilis MA-4680] | | | avermitilis MA-4680 | domain. |
| 223, | cellulose 1;4-beta-cellobiosidase [Streptomyces | 29828395 | 0 | Streptomyces | Thermostable cellulase-E3 catalytic |
| 224 | avermitilis MA-4680] | | | avermitilis MA-4680 | domain. |
| 225, | cellulose 1;4-beta-cellobiosidase [Streptomyces | 29828395 | 0 | Streptomyces | Thermostable cellulase-E3 catalytic |
| 226 | avermitilis MA-4680] | | | avermitilis MA-4680 | domain. |
| 227, | cellulose 1;4-beta-cellobiosidase [Streptomyces | 29828395 | 0 | Streptomyces | Thermostable cellulase-E3 catalytic |
| 228 | avermitilis MA-4680] | | | avermitilis MA-4680 | domain. |
| 229, | cellulose 1;4-beta-cellobiosidase [Streptomyces | 29828395 | 0 | Streptomyces | Thermostable cellulase-E3 catalytic |
| 230 | avermitilis MA-4680] | | | avermitilis MA-4680 | domain. |
| 231, | endoglucanase D. | 606791 | 0 | Fibrobacter | X campestris umce19A cellulase gene |
| 232 | | | | succinogenes | SeqID1. |
| 233, | endoglucanase. | 228944 | 1.00E−68 | Prevotella ruminicola | Cow cellulase DNA clones pBKRR 2 |
| 234 | | | | | and pBKRR 16 SEQ ID NO: 3. |
| 235, | CelA [Mycobacterium avium subsp. paratuberculosis K- | 41406378 | 2.00E−62 | Mycobacterium avium | Amino acid sequence of a gene down- |
| 236 | 10] | | | subsp. | regulated during carbon starvation. |
| | | | | paratuberculosis K-10 | |
| 237, | CelA [Mycobacterium avium subsp. paratuberculosis K- | 41406378 | 3.00E−62 | Mycobacterium avium | Amino acid sequence of a gene down- |
| 238 | 10] | | | subsp. | regulated during carbon starvation. |
| | | | | paratuberculosis K-10 | |
| 239, | CelA [Mycobacterium avium subsp. paratuberculosis K- | 41406378 | 2.00E−62 | Mycobacterium avium | Amino acid sequence of a gene down- |
| 240 | 10] | | | subsp. | regulated during carbon starvation. |
| | | | | paratuberculosis K-10 | |
| 241, | glycoside hydrolase, family 48 [Herpetosiphon | 113939770 | 0 | Herpetosiphon | A. cellulolyticus Gux1 protein FN_III |
| 242 | aurantiacus ATCC 23779] | | | aurantiacus ATCC | domain fragment. |
| | gi\|113898624\|gb\|EAU17637.1\|glycoside hydrolase, | | | 23779 | |
| | family 48 [Herpetosiphon aurantiacus ATCC 23779] | | | | |
| 243, | Cellulase [Acidothermus cellulolyticus 11B] | 88932594 | 1.00E−124 | Acidothermus | Saccharothrix australiensis endo-beta- |
| 244 | gi\|88911374\|gb\|EAR30819.1\|Cellulase [Acidothermus | | | cellulolyticus 11B | 1,4-glucanase gene. |
| | cellulolyticus 11B] | | | | |
| 245, | Cellulase [Saccharophagus degradans 2-40] | 90020283 | 1.00E−117 | Saccharophagus | Microbulbifer degradans cellulase |
| 246 | | | | degradans 2-40 | system protein - SEQ ID 8. |
| 247, | cellulase [uncultured bacterium] | 56675038 | 1.00E−116 | uncultured bacterium | X campestris umce19A cellulase gene |
| 248 | | | | | SeqID1. |
| 249, | endoglucanase - Clostridium cellulovorans. | 98588 | 5.00E−87 | Clostridium | Amino acid sequence of a CelE |
| 250 | | | | cellulovorans | cellulase polypeptide. |
| 251, | GnuB [uncultured bacterium] | 37222147 | 1.00E−46 | uncultured bacterium | Primer used to construct a hybrid |
| 252 | | | | | endoglucanase. |
| 253, | glycoside hydrolase, family 48 [Herpetosiphon | 113939770 | 0 | Herpetosiphon | A. cellulolyticus Gux1 protein FN_III |
| 254 | aurantiacus ATCC 23779] | | | aurantiacus ATCC | domain fragment. |
| | gi\|113898624\|gb\|EAU17637.1\|glycoside hydrolase, | | | 23779 | |
| | family 48 [Herpetosiphon aurantiacus ATCC 23779] | | | | |
| 255, | glycoside hydrolase, family 48 [Herpetosiphon | 113939770 | 0 | Herpetosiphon | A. cellulolyticus Gux1 protein FN_III |
| 256 | aurantiacus ATCC 23779] | | | aurantiacus ATCC | domain fragment. |
| | gi\|113898624\|gb\|EAU17637.1\|glycoside hydrolase, | | | 23779 | |
| | family 48 [Herpetosiphon aurantiacus ATCC 23779] | | | | |
| 257, | glycoside hydrolase, family 48 [Herpetosiphon | 113939770 | 0 | Herpetosiphon | A. cellulolyticus Gux1 protein FN_III |
| 258 | aurantiacus ATCC 23779] | | | aurantiacus ATCC | domain fragment. |
| | gi\|113898624\|gb\|EAU17637.1\|glycoside hydrolase, | | | 23779 | |
| | family 48 [Herpetosiphon aurantiacus ATCC 23779] | | | | |
| 259, | glycoside hydrolase, family 48 [Herpetosiphon | 113939770 | 0 | Herpetosiphon | A. cellulolyticus Gux1 protein FN_III |
| 260 | aurantiacus ATCC 23779] | | | aurantiacus ATCC | domain fragment. |
| | gi\|113898624\|gb\|EAU17637.1\|glycoside hydrolase, | | | 23779 | |
| | family 48 [Herpetosiphon aurantiacus ATCC 23779] | | | | |
| 261, | CMC-xylanase [Fibrobacter succinogenes S85]. | 2980984 | 1.00E−145 | Fibrobacter | Xylanase from an environmental |
| 262 | | | | succinogenes S85 | sample seq id 14. |
| 263, | glycoside hydrolase, family 48 [Herpetosiphon | 113939770 | 0 | Herpetosiphon | A. cellulolyticus Gux1 protein FN_III |
| 264 | aurantiacus ATCC 23779] | | | aurantiacus ATCC | domain fragment. |
| | gi\|113898624\|gb\|EAU17637.1\|glycoside hydrolase, | | | 23779 | |
| | family 48 [Herpetosiphon aurantiacus ATCC 23779] | | | | |
| 265, | hypothetical protein Cphamn1DRAFT_0678 | 67942301 | 9.00E−22 | Chlorobium | Prokaryotic essential gene #34740. |
| 266 | [Chlorobium phaeobacteroides BS1] | | | phaeobacteroides | |
| | gi\|67911488\|gb\|EAM61510.1\|hypothetical protein | | | BS1 | |
| | Cphamn1DRAFT_0678 [Chlorobium phaeobacteroides | | | | |
| | BS1] | | | | |
| 267, | exoglucanase 2 precursor [Aspergillus terreus NIH2624] | 115401052 | 0 | Aspergillus terreus | A. fumigatus AfGOX3. |
| 268 | | | | NIH2624 | |
| 269, | glycoside hydrolase; family 5 [Acidobacteria bacterium | 94968716 | 3.00E−40 | Acidobacteria | Glucose isomerase SEQ ID NO 20. |
| 270 | Ellin345] | | | bacterium Ellin345 | |
| 271, | endoglucanase 3. | 666885 | 3.00E−39 | Fibrobacter intestinalis | Glucose isomerase SEQ ID NO 20. |
| 272 | | | | | |
| 273, | beta-1,4-endoglucanase [Pratylenchus penetrans]. | 15777927 | 3.00E−59 | Pratylenchus | Bacterial polypeptide #10001. |
| 274 | | | | penetrans | |
| 275, | endoglucanase 3. | 666885 | 5.00E−39 | Fibrobacter intestinalis | Glucose isomerase SEQ ID NO 20. |
| 276 | | | | | |
| 277, | glycoside hydrolase; family 5 [Acidobacteria bacterium | 94968716 | 1.00E−39 | Acidobacteria | Glucose isomerase SEQ ID NO 20. |
| 278 | Ellin345] | | | bacterium Ellin345 | |
| 279, | endoglucanase 3. | 666885 | 6.00E−40 | Fibrobacter intestinalis | Glucose isomerase SEQ ID NO 20. |
| 280 | | | | | |
| 281, | GUNB_FUSOX Putative endoglucanase type B | 46115572 | 0 | Gibberella zeae PH-1 | Cellbionydrolase-2 (CBH2) mutant |
| 282 | precursor (Endo-1;4-beta-glucanase) (Cellulase) | | | | S316P. |
| | [Gibberella zeae PH-1] | | | | |
| 283, | beta-1,4-endoglucanase [Pratylenchus penetrans]. | 15777927 | 4.00E−59 | Pratylenchus | Bacterial polypeptide #10001. |
| 284 | | | | penetrans | |
| 285, | CHU large protein; endoglucanase; glycoside hydrolase | 110637516 | 2.00E−75 | Cytophaga | Bacterial polypeptide #10001. |
| 286 | family 5 protein [Cytophaga hutchinsonii ATCC 33406] | | | hutchinsonii ATCC | |
| | | | | 33406 | |
| 287, | Chitinase., Cellulase [Mycobacterium vanbaalenii PYR- | 90206181 | 0 | Mycobacterium | PCR primer, SP3R, used to amplify rice |
| 288 | 1] gi\|90194972\|gb\|EAS21741.1\|Chitinase., Cellulase | | | vanbaalenii PYR-1 | rbcS signal peptide. |
| | [Mycobacterium vanbaalenii PYR-1] | | | | |
| 289, | endoglucanase 3. | 666885 | 9.00E−41 | Fibrobacter intestinalis | Glucose isomerase SEQ ID NO 20. |
| 290 | | | | | |
| 291, | CELLODEXTRINASE. | 121818 | 9.00E−99 | Butyrivibrio | Microbulbifer degradans cellulase |
| 292 | | | | fibrisolvens | system protein - SEQ ID 8. |
| 293, | CELLODEXTRINASE. | 121818 | 1.00E−100 | Butyrivibrio | X campestris umce19A cellulase gene |
| 294 | | | | fibrisolvens | SeqID1. |
| 295, | endoglucanase D. | 606791 | 1.00E−132 | Fibrobacter | X campestris umce19A cellulase gene |
| 296 | | | | succinogenes | SeqID1. |
| 297, | cellulase [Xanthomonas campestris pv. campestris str. | 21231824 | 1.00E−133 | Xanthomonas | X campestris umce19A cellulase gene |
| 298 | ATCC 33913]. | | | campestris pv. | SeqID1. |
| | | | | campestris str. ATCC | |
| | | | | 33913 | |
| 299, | cellulase [Xanthomonas campestris pv. campestris str. | 21231824 | 1.00E−131 | Xanthomonas | X campestris umce19A cellulase gene |
| 300 | ATCC 33913]. | | | campestris pv. | SeqID1. |
| | | | | campestris str. ATCC | |
| | | | | 33913 | |
| 301, | endo-1;4-beta-D-glucanase [uncultured bacterium] | 78926927 | 1.00E−132 | uncultured bacterium | X campestris umce19A cellulase gene |
| 302 | | | | | SeqID1. |
| 303, | endoglucanase D. | 606791 | 1.00E−135 | Fibrobacter | X campestris umce19A cellulase gene |
| 304 | | | | succinogenes | SeqID1. |
| 305, | hypothetical protein Sde_3003 [Saccharophagus | 90022645 | 9.00E−62 | Saccharophagus | Microbulbifer degradans cellulase |
| 306 | degradans 2-40] | | | degradans 2-40 | system protein - SEQ ID 8. |
| 307, | hypothetical protein Sde_3003 [Saccharophagus | 90022645 | 1.00E−62 | Saccharophagus | Microbulbifer degradans cellulase |
| 308 | degradans 2-40] | | | degradans 2-40 | system protein - SEQ ID 8. |
| 309, | CELLODEXTRINASE. | 121818 | 2.00E−91 | Butyrivibrio | X campestris umce19A cellulase gene |
| 310 | | | | fibrisolvens | SeqID1. |
| 311, | hypothetical protein Sde_3003 [Saccharophagus | 90022645 | 4.00E−68 | Saccharophagus | Microbulbifer degradans cellulase |
| 312 | degradans 2-40] | | | degradans 2-40 | system protein - SEQ ID 8. |
| 313, | GnuB [uncultured bacterium] | 37222147 | 3.00E−35 | uncultured bacterium | Primer used to construct a hybrid |
| 314 | | | | | endoglucanase. |
| 315, | secreted cellulase [Streptomyces coelicolor A3(2)] | 21224850 | 0 | Streptomyces | Thermostable cellulase-E3 catalytic |
| 316 | | | | coelicolor A3(2) | domain. |
| 317, | cellobiohydrolase II-I [Volvariella volvacea] | 49333367 | 8.00E−87 | Volvariella volvacea | Trametes hirsuta cellulolytic enzyme- |
| 318 | | | | | related protein - SEQ ID 12. |
| 319, | cellobiohydrolase II-I [Volvariella volvacea] | 49333367 | 8.00E−87 | Volvariella volvacea | Trametes hirsuta cellulolytic enzyme- |
| 320 | | | | | related protein - SEQ ID 12. |
| 321, | cellobiohydrolase II-I [Volvariella volvacea] | 49333367 | 6.00E−87 | Volvariella volvacea | Trametes hirsuta cellulolytic enzyme- |
| 322 | | | | | related protein - SEQ ID 12. |
| 323, | endoglucanase A [Stigmatella aurantiaca DW4/3-1] | 115373264 | 2.00E−83 | Stigmatella aurantiaca | M. xanthus protein sequence, seq id |
| 324 | gi\|115369710\|gb\|EAU68645.1\|endoglucanase A | | | DW4/3-1 | 9726. |
| | [Stigmatella aurantiaca DW4/3-1] | | | | |
| 325, | endoglucanase A [Stigmatella aurantiaca DW4/3-1] | 115373264 | 2.00E−85 | Stigmatella aurantiaca | M. xanthus protein sequence, seq id |
| 326 | gi\|115369710\|gb\|EAU68645.1\|endoglucanase A | | | DW4/3-1 | 9726. |
| | [Stigmatella aurantiaca DW4/3-1] | | | | |
| 327, | endoglucanase A [Stigmatella aurantiaca DW4/3-1] | 115373264 | 2.00E−83 | Stigmatella aurantiaca | M. xanthus protein sequence, seq id |
| 328 | gi\|115369710\|gb\|EAU68645.1\|endoglucanase A | | | DW4/3-1 | 9726. |
| | [Stigmatella aurantiaca DW4/3-1] | | | | |
| 329, | endoglucanase A [Stigmatella aurantiaca DW4/3-1] | 115373264 | 9.00E−84 | Stigmatella aurantiaca | M. xanthus L protein sequence, seq id |
| 330 | gi\|115369710\|gb\|EAU68645.1\|endoglucanase A | | | DW4/3-1 | 9726. |
| | [Stigmatella aurantiaca DW4/3-1] | | | | |
| 331, | endoglucanase A [Stigmatella aurantiaca DW4/3-1] | 115373264 | 6.00E−85 | Stigmatella aurantiaca | M. xanthus protein sequence, seq id |
| 332 | gi\|115369710\|gb\|EAU68645.1\|endoglucanase A | | | DW4/3-1 | 9726. |
| | [Stigmatella aurantiaca DW4/3-1] | | | | |
| 333, | cellobiohydrolase II-I [Volvariella volvacea] | 49333367 | 1.00E−86 | Volvariella volvacea | Trametes hirsuta cellulolytic enzyme- |
| 334 | | | | | related protein - SEQ ID 12. |
| 335, | cellobiohydrolase II-I [Volvariella volvacea] | 49333367 | 8.00E−87 | Volvariella volvacea | Trametes hirsuta cellulolytic enzyme- |
| 336 | | | | | related protein - SEQ ID 12. |
| 337, | endo-1;4-beta-D-glucanase [uncultured bacterium] | 78926855 | 1.00E−134 | uncultured bacterium | X campestris umce19A cellulase gene |
| 338 | | | | | SeqID1. |
| 339, | endoglucanase-related protein; glycoside hydrolase | 110638631 | 1.00E−87 | Cytophaga | X campestris umce19A cellulase gene |
| 340 | family 9 protein [Cytophaga hutchinsonii ATCC 33406] | | | hutchinsonii ATCC | SeqID1. |
| | | | | 33406 | |
| 341, | beta-1,4-endoglucanase [Cellulomonas pachnodae]. | 5880498 | 1.00E−112 | Cellulomonas | Amino acid sequence of a gene down- |
| 342 | | | | pachnodae | regulated during carbon starvation. |
| 343, | beta-1,4-endoglucanase [Cellulomonas pachnodae]. | 5880498 | 1.00E−112 | Cellulomonas | Amino acid sequence of a gene down- |
| 344 | | | | pachnodae | regulated during carbon starvation. |
| 345, | glycoside hydrolase, family 6 [Herpetosiphon | 113938252 | 1.00E−146 | Herpetosiphon | Amino acid sequence of the GuxA |
| 346 | aurantiacus ATCC 23779] | | | aurantiacus ATCC | potential signal peptide. |
| | gi\|113900042\|gb\|EAU19035.1\|glycoside hydrolase, | | | 23779 | |
| | family 6 [Herpetosiphon aurantiacus ATCC 23779] | | | | |
| 347, | GnuB [uncultured bacterium] | 37222147 | 5.00E−56 | uncultured bacterium | Primer used to construct a hybrid |
| 348 | | | | | endoglucanase. |
| 349, | glycoside hydrolase, family 6 [Herpetosiphon | 113938252 | 1.00E−119 | Herpetosiphon | Microbulbifer degradans cellulase |
| 350 | aurantiacus ATCC 23779] | | | aurantiacus ATCC | system protein - SEQ ID 8. |
| | gi\|113900042\|gb\|EAU19035.1\|glycoside hydrolase, | | | 23779 | |
| | family 6 [Herpetosiphon aurantiacus ATCC 23779] | | | | |
| 351, | Cellobiohydrolase A (1 4-beta-cellobiosidase A)-like | 90021917 | 0 | Saccharophagus | Microbulbifer degradans cellulase |
| 352 | [Saccharophagus degradans 2-40] | | | degradans 2-40 | system protein - SEQ ID 8. |
| 353, | secreted endoglucanase [Streptomyces coelicolor | 21221288 | 7.00E−63 | Streptomyces | Saccharothrix australiensis endo-beta- |
| 354 | A3(2)] | | | coelicolor A3(2) | 1,4-glucanase gene. |
| 355, | cellobiohydrolase D [Aspergillus fumigatus Af293] | 70991503 | 0 | Aspergillus fumigatus | Cellobiohydrolase I activity protein SEQ |
| 356 | | | | Af293 | ID No 16. |
| 357, | EXOGLUCANASE II PRECURSOR | 121855 | 0 | Hypocrea jecorina | Cellbionydrolase-2 (CBH2) mutant |
| 358 | (EXOCELLOBIOHYDROLASE II) (CBHII) (1,4-BETA- | | | | S316P. |
| | CELLOBIOHYDROLASE). | | | | |
| 359, | cellobiohydrolase I [Penicillium occitanis] | 51243029 | 0 | Penicillium occitanis | Acremonium cellulolyticus xylanase |
| 360 | | | | | precursor. |
| 361, | Glycoside hydrolase, family 9: Bacterial type 3a | 67874739 | 0 | Clostridium | TokcelR primer used to isolate Tok7B.1 |
| 362 | cellulose-binding domain: Clostridium cellulosome | | | thermocellum ATCC | celE gene. |
| | enzyme, dockerin type I [Clostridium thermocellum | | | 27405 | |
| | ATCC 27405] gi\|121828\|sp\|P26224\|GUNF_CLOTM | | | | |
| | Endoglucanase F precursor (EGF) (Endo-1,4-beta- | | | | |
| | glucanase) (Cellul | | | | |
| 363, | Glycoside hydrolase, family 18: Clostridium cellulosome | 67873373 | 0 | Clostridium | Thermus aquaticus Taq polymerase |
| 364 | enzyme, dockerin type I [Clostridium thermocellum | | | thermocellum ATCC | homolog No. 3. |
| | ATCC 27405] gi\|67851769\|gb\|EAM47332.1\|Glycoside | | | 27405 | |
| | hydrolase, family 18: Clostridium cellulosome enzyme, | | | | |
| | dockerin type I [Clostridium thermocellum ATCC 2 | | | | |
| 365, | Glycoside hydrolase, family 8: Clostridium cellulosome | 67873374 | 0 | Clostridium | Clostridium josui cellulose degrading |
| 366 | enzyme, dockerin type I [Clostridium thermocellum | | | thermocellum ATCC | cellulase D protein. |
| | ATCC 27405] gi\|121803\|sp\|P04955\|GUNA_CLOTM | | | 27405 | |
| | Endoglucanase A precursor (EGA) (Endo-1,4-beta- | | | | |
| | glucanase) (Cellulase A) gi\|144753\|gb\|AAA83521.1\| | | | | |
| | endoglucanase | | | | |
| 367, | endo-1;4-beta-D-glucanase [uncultured bacterium] | 78926855 | 1.00E−119 | uncultured bacterium | X campestris umce19A cellulase gene |
| 368 | | | | | SeqID1. |
| 431, | endo-1;4-beta-xylanase precursor [uncultured | 46253618 | 2.00E−93 | uncultured bacterium | Xylanase from an environmental |
| 432 | bacterium] | | | | sample seq id 14. |
| 433, | ENDO-1,4-BETA-XYLANASE B PRECURSOR | 139881 | 0 | Pseudomonas | Xylanase from an environmental |
| 434 | (XYLANASE B) (1,4-BETA-D-XYLAN | | | fluorescens | sample seq id 14. |
| | XYLANOHYDROLASE B). | | | | |
| 435, | endo-1,3(4)-beta-glucanase [Clostridium thermocellum]. | 19171141 | 1.00E−153 | Clostridium | Bacillus circulans oligonucleotide. |
| 436 | | | | thermocellum | |
| 437, | cellulase [Bacillus sp. BP-23]. | 4490766 | 5.00E−98 | Bacillus sp. BP-23 | Bacillus sp. KSM-N440 alkaline |
| 438 | | | | | cellulase protein, SEQ ID 4. |
| 439, | Glycoside hydrolase, family 10: Clostridium cellulosome | 67873837 | 1.00E−130 | Clostridium | Xylanase from an environmental |
| 440 | enzyme, dockerin type I: Carbohydrate-binding, CenC- | | | thermocellum ATCC | sample seq id 14. |
| | like [Clostridium thermocellum ATCC 27405] | | | 27405 | |
| | gi\|67851540\|gb\|EAM47104.1\|Glycoside hydrolase, | | | | |
| | family 10: Clostridium cellulosome enzyme, dockerin | | | | |
| | type I: | | | | |
| 441, | xylanase XynA GH 10 [Paenibacillus sp. JDR-2] | 62990090 | 8.00E−97 | Paenibacillus sp. JDR-2 | Xylanase from an environmental |
| 442 | | | | | sample seq id 14. |
| 443, | Putative esterase: Glycoside hydrolase, family | 67916212 | 0 | Clostridium | Xylanase from an environmental |
| 444 | 10: Clostridium cellulosome enzyme, dockerin type | | | thermocellum ATCC | sample seq id 14. |
| | I: Carbohydrate-binding, CenC-like [Clostridium | | | 27405 | |
| | thermocellum ATCC 27405] | | | | |
| | gi\|67849815\|gb\|EAM45408.1\|Putative | | | | |
| | esterase: Glycoside hydrolase, family 10: Clostridium | | | | |
| 445, | glycoside hydrolase, family 9 [Herpetosiphon | 113939769 | 0 | Herpetosiphon | Vibrio harveyi endoglucanase DNA. |
| 446 | aurantiacus ATCC 23779] | | | aurantiacus ATCC | |
| | gi\|113898623\|gb\|EAU17636.1\|glycoside hydrolase, | | | 23779 | |
| | family 9 [Herpetosiphon aurantiacus ATCC 23779] | | | | |
| 447, | beta-glucanase [thermophilic anaerobe NA10]. | 2564015 | 0 | thermophilic anaerobe | TokcelR primer used to isolate Tok7B.1 |
| 448 | | | | NA10 | celE gene. |
| 449, | cellulose binding protein CelS2 [Streptomyces | 4680329 | 0 | Streptomyces | Pseudomonas aeruginosa quorum |
| 450 | viridosporus]. | | | viridosporus | sensing controlled protein, SEQ ID 399. |
| 451, | uncharacterized protein contain chitin-binding domain | 83644003 | 1.00E−151 | Hahella chejuensis | Enterobacter cloacae protein amino |
| 452 | type 3 [Hahella chejuensis KCTC 2396] | | | KCTC 2396 | acid sequence - SEQ ID 5666. |
| 453, | hypothetical protein Acid_6287 [Solibacter usitatus | 116625342 | 2.00E−19 | Solibacter usitatus | Xylanase from an environmental |
| 454 | Ellin6076] gi\|116228504\|gb\|ABJ87213.1\|hypothetical | | | Ellin6076 | sample seq id 14. |
| | protein Acid_6287 [Solibacter usitatus Ellin6076] | | | | |
| 455, | cellulose-binding; family II; bacterial type [Thermobifida | 72161048 | 1.00E−150 | Thermobifida fusca | Bacterial polypeptide #10001. |
| 456 | fusca YX] | | | YX | |
| 457, | cellulose-binding; family II; bacterial type: Fibronectin; | 72162066 | 0 | Thermobifida fusca | Pseudomonas aeruginosa quorum |
| 458 | type III [Thermobifida fusca YX] | | | YX | sensing controlled protein, SEQ ID 399. |
| 459, | chitin-binding protein [Streptomyces thermoviolaceus] | 38347733 | 4.00E−80 | Streptomyces | Enterobacter cloacae protein amino |
| 460 | | | | thermoviolaceus | acid sequence - SEQ ID 5666. |
| 461, | laminarinase [Thermotoga maritima]. | 15642799 | 0 | Thermotoga maritima | Oerskovia xanthineolytica beta-1,3- |
| 462 | | | | | glucanase. |
| 471, | secreted cellulose binding protein [Streptomyces | 21219699 | 0 | Streptomyces | Pseudomonas aeruginosa quorum |
| 472 | coelicolor A3(2)] | | | coelicolor A3(2) | sensing controlled protein, SEQ ID 399. |
| 489, | hypothetical protein FG03795.1 [Gibberella zeae PH-1] | 46115906 | 1.00E−163 | Gibberella zeae PH-1 | P. brasilianum cel5c endoglucanase |
| 490 | | | | | reverse PCR primer, SEQ ID NO: 15. |
| 491, | endoglucanase C [Aspergillus kawachii]. | 15054480 | 0 | Aspergillus kawachii | Endo beta-1,4-gluconase peptide 3. |
| 492 | | | | | |
| 493, | endoglucanase C [Aspergillus kawachii]. | 15054480 | 0 | Aspergillus kawachii | Endo beta-1,4-gluconase peptide 3. |
| 494 | | | | | |
| 495, | hypothetical protein SNOG_04886 [Phaeosphaeria | 1.61E+08 | 1.00E−160 | Phaeosphaeria | Cellulase cDNA clone 12. |
| 496 | nodorum SN15] | | | nodorum SN15 | |
| 497, | hypothetical protein FG03795.1 [Gibberella zeae PH-1] | 46115906 | 1.00E−157 | Gibberella zeae PH-1 | Bacterial polypeptide #23667. |
| 498 | | | | | |
| 499, | hypothetical protein FG03795.1 [Gibberella zeae PH-1] | 46115906 | 0 | Gibberella zeae PH-1 | P. brasilianum cel5c endoglucanase |
| 500 | | | | | reverse PCR primer, SEQ ID NO: 15. |
| 501, | hypothetical protein [Neurospora crassa OR74A] | 85111901 | 1.00E−158 | Neurospora crassa | Bacterial polypeptide #23667. |
| 502 | gi\|28925928\|gb\|EAA34923.1\|endoglucanase 3 | | | OR74A | |
| | precursor [Neurospora crassa OR74A] | | | | |
| | gi\|38636418\|emb\|CAE81955.1\|probable cellulase | | | | |
| | precursor [Neurospora crassa] | | | | |
| 503, | hypothetical protein FG01621.1 [Gibberella zeae PH-1] | 46109478 | 1.00E−119 | Gibberella zeae PH-1 | Endoglucanase protein. |
| 504 | | | | | |
| 505, | hypothetical protein CHGG_01188 [Chaetomium | 1.16E+08 | 1.00E−179 | Chaetomium | Endoglucanase SEQ ID NO: 6. |
| 506 | globosum CBS 148.51] gi\|88185485\|gb\|EAQ92953.1\| | | | globosum CBS | |
| | hypothetical protein CHGG_01188 [Chaetomium | | | 148.51 | |
| | globosum CBS 148.51] | | | | |
| 507, | hypothetical protein CHGG_02213 [Chaetomium | 1.16E+08 | 1.00E−124 | Chaetomium | Talaromyces emersonii beta- |
| 508 | globosum CBS 148.51] gi\|88182810\|gb\|EAQ90278.1\| | | | globosum CBS | glucanase CEC protein. |
| | hypothetical protein CHGG_02213 [Chaetomium | | | 148.51 | |
| | globosum CBS 148.51] | | | | |
| 509, | ENDOGLUCANASE 3 PRECURSOR (ENDO-1,4- | 13959390 | 0 | Humicola insolens | Endoglucanase SEQ ID NO: 6. |
| 510 | BETA-GLUCANASE 3) (CELLULASE 3). | | | | |
| 511, | hypothetical protein An01g11670 [Aspergillus niger] | 1.45E+08 | 0 | Aspergillus niger | P. brasilianum cel5c endoglucanase |
| 512 | gi\|134055695\|emb\|CAK44069.1\|unnamed protein | | | | reverse PCR primer, SEQ ID NO: 15. |
| | product [Aspergillus niger] | | | | |
| 513, | hypothetical protein FG03795.1 [Gibberella zeae PH-1] | 46115906 | 0 | Gibberella zeae PH-1 | P. brasilianum cel5c endoglucanase |
| 514 | | | | | reverse PCR primer, SEQ ID NO: 15. |
| 515, | glycoside hydrolase, family 5 [Clostridium thermocellum | 1.26E+08 | 0 | Clostridium | Orpinomyces cellulase CelB cDNA. |
| 516 | ATCC 27405] gi\|125713540\|gb\|ABN52032.1\|glycoside | | | thermocellum ATCC | |
| | hydrolase, family 5 [Clostridium thermocellum ATCC | | | 27405 | |
| | 27405] | | | | |
| 517, | hypothetical protein An01g11670 [Aspergillus niger] | 1.45E+08 | 0 | Aspergillus niger | P. brasilianum cel5c endoglucanase |
| 518 | gi\|134055695\|emb\|CAK44069.1\|unnamed protein | | | | reverse PCR primer, SEQ ID NO: 15. |
| | product [Aspergillus niger] | | | | |
| 519, | endoglucanase, putative [Aspergillus fumigatus Af293] | 70992389 | 1.00E−170 | Aspergillus fumigatus | P. brasilianum cel5c endoglucanase |
| 520 | gi\|66848676\|gb\|EAL89005.1\|endoglucanase, putative | | | Af293 | reverse PCR primer, SEQ ID NO: 15. |
| | [Aspergillus fumigatus Af293] | | | | |
| 521, | hypothetical protein An12g02220 [Aspergillus niger] | 1.45E+08 | 0 | Aspergillus niger | A. fumigatus AfGOX3. |
| 522 | gi\|134080021\|emb\|CAK41068.1\|unnamed protein | | | | |
| | product [Aspergillus niger] | | | | |
| 523, | cellulose 1,4-beta-cellobiosidase [Acremonium | 1.57E+08 | 0 | Acremonium | Cellobiohydrolase I activity protein |
| 524 | thermophilum] | | | thermophilum | SEQ ID No 16. |
| 525, | Beta-glucosidase [Maricaulis maris MCS10] | 1.15E+08 | 0 | Maricaulis maris | Microbulbifer degradans cellulase |
| 526 | gi\|114341732\|gb\|ABI67012.1\|exo-1,4-beta-glucosidase | | | MCS10 | system protein - SEQ ID 8. |
| | [Maricaulis maris MCS10] | | | | |
| 527, | Beta-N-acetylglucosaminidase/beta-glucosidase (3- | 75387204 | 1.00E−147 | Cellulomonas fimi | Bacterial beta-hexosaminidase gene |
| 528 | beta-N-acetyl-D-glucosaminidase/beta-D-glucosidase) | | | | SEQ ID NO: 8. |
| | (Nag3) gi\|33320077\|gb\|AAQ05801.1\|AF478460_1 N- | | | | |
| | acetyl-beta-glucosaminidase [Cellulomonas fimi] | | | | |
| 529, | BETA-GLUCOSIDASE A (GENTIOBIASE) | 114957 | 0 | Clostridium | Agrobacterium sp. bgls_agrsp strand- |
| 530 | (CELLOBIASE) (BETA-D-GLUCOSIDE | | | thermocellum | glucosidase. |
| | GLUCOHYDROLASE). | | | | |
| 531, | Beta-glucosidase [Sorangium cellulosum ‘So ce 56’] | 1.62E+08 | 1.00E−154 | Sorangium | Bacterial polypeptide #23667. |
| 532 | gi\|161163155\|emb\|CAN94460.1\|Beta-glucosidase | | | cellulosum ‘So ce 56 | |
| | [Sorangium cellulosum ‘So ce 56’] | | | | |
| 533, | hypothetical protein RUMOBE_00331 [Ruminococcus | 1.54E+08 | 1.00E−121 | Ruminococcus | Anti-biofilm polypeptide #100. |
| 534 | obeum ATCC 29174] gi\|149834128\|gb\|EDM89208.1\| | | | obeum ATCC 29174 | |
| | hypothetical protein RUMOBE_00331 [Ruminococcus | | | | |
| | obeum ATCC 29174] | | | | |
| 535, | beta-glucosidase [Pyrococcus horikoshii]. | 14590274 | 0 | Pyrococcus horikoshii | Anti-biofilm polypeptide #100. |
| 536 | | | | | |
| 537, | beta-glucosidase [Thermotoga maritima]. | 15642800 | 0 | Thermotoga maritima | Anti-biofilm polypeptide #100. |
| 538 | | | | | |
| 539, | Beta-glucosidase [Sorangium cellulosum ‘So ce 56’] | 1.62E+08 | 0 | Sorangium | Anti-biofilm polypeptide #100. |
| 540 | gi\|161166527\|emb\|CAN97832.1\|Beta-glucosidase | | | cellulosum ‘So ce 56 | |
| | [Sorangium cellulosum ‘So ce 56’] | | | | |
| 541, | glycoside hydrolase family 1 [Opitutaceae bacterium | 1.54E+08 | 1.00E−177 | Opitutaceae | Anti-biofilm polypeptide #100. |
| 542 | TAV2] gi\|151582326\|gb\|EDN45879.1\|glycoside | | | bacterium TAV2 | |
| | hydrolase family 1 [Opitutaceae bacterium TAV2] | | | | |
| 543, | glycoside hydrolase family 1 [Chloroflexus aurantiacus | 1.64E+08 | 1.00E−125 | Chloroflexus | Bacterial polypeptide #23667. |
| 544 | J-10-fl] gi\|163667244\|gb\|ABY33610.1\|glycoside | | | aurantiacus J-10-fl | |
| | hydrolase family 1 [Chloroflexus aurantiacus J-10-fl] | | | | |
| 545, | Beta-glucosidase [Salinispora arenicola CNS-205] | 1.59E+08 | 1.00E−129 | Salinispora arenicola | T. bispora NRRL 15568 beta- |
| 546 | gi\|157914892\|gb\|ABV96319.1\|Beta-glucosidase | | | CNS-205 | glucosidase. |
| | [Salinispora arenicola CNS-205] | | | | |
| 547, | Beta-glucosidase [Sorangium cellulosum ‘So ce 56’] | 1.62E+08 | 0 | Sorangium | Bacterial polypeptide #23667. |
| 548 | gi\|161163155\|emb\|CAN94460.1\|Beta-glucosidase | | | cellulosum ‘So ce 56 | |
| | [Sorangium cellulosum ‘So ce 56’] | | | | |
| 549, | beta-glucosidase [Vibrio shilonii AK1] | 1.49E+08 | 1.00E−163 | Vibrio shilonii AK1 | Anti-biofilm polypeptide #100. |
| 550 | gi\|148838481\|gb\|EDL55421.1\|beta-glucosidase [Vibrio | | | | |
| | shilonii AK1] | | | | |
| 551, | glycoside hydrolase, family 1 [Novosphingobium | 87198566 | 1.00E−122 | Novosphingobium | Bacterial polypeptide #23667. |
| 552 | aromaticivorans DSM 12444] | | | aromaticivorans DSM | |
| | gi\|87134247\|gb\|ABD24989.1\|glycoside hydrolase, | | | 12444 | |
| | family 1 [Novosphingobium aromaticivorans DSM | | | | |
| | 12444] | | | | |
| 553, | beta-glucosidase [Pyrococcus horikoshii]. | 14590274 | 2.00E−77 | Pyrococcus horikoshii | Pyrococcus horikoshii beta- |
| 554 | | | | | glycosidase enzyme - SEQ ID 2. |
| 555, | beta-glucosidase [Pyrococcus furiosus DSM 3638]. | 18976445 | 0 | Pyrococcus furiosus | Thermostable beta-galactosidase |
| 556 | | | | DSM 3638 | conserved sequence (Box 10). |
| 557, | hypothetical protein SNOG_12988 [Phaeosphaeria | 1.61E+08 | 0 | Phaeosphaeria | Trichoderma reesei bgl1 gene. |
| 558 | nodorum SN15] | | | nodorum SN15 | |
| 559, | glycoside hydrolase family 1 [Fervidobacterium | 1.54E+08 | 0 | Fervidobacterium | Anti-biofilm polypeptide #100. |
| 560 | nodosum Rt17-B1] gi\|154154169\|gb\|ABS61401.1\| | | | nodosum Rt17-B1 | |
| | glycoside hydrolase family 1 [Fervidobacterium | | | | |
| | nodosum Rt17-B1] | | | | |
| 561, | putative Beta-glucosidase A [Loktanella vestfoldensis | 84517375 | 1.00E−178 | Loktanella | T. bispora NRRL 15568 beta- |
| 562 | SKA53] gi\|84508739\|gb\|EAQ05203.1\|putative Beta- | | | vestfoldensis SKA53 | glucosidase. |
| | glucosidase A [Loktanella vestfoldensis SKA53] | | | | |
| 563, | Beta-glucosidase [Sorangium cellulosum ‘So ce 56’] | 1.62E+08 | 0 | Sorangium | Anti-biofilm polypeptide #100. |
| 564 | gi\|161166527\|emb\|CAN97832.1\|Beta-glucosidase | | | cellulosum ‘So ce 56 | |
| | [Sorangium cellulosum ‘So ce 56’] | | | | |
| 565, | Beta-glucosidase [Roseiflexus sp. RS-1] | 1.49E+08 | 1.00E−153 | Roseiflexus sp. RS-1 | Bacterial polypeptide #23667. |
| 566 | gi\|148569824\|gb\|ABQ91969.1\|beta-glucosidase. | | | | |
| | Glycosyl Hydrolase family 1. [Roseiflexus sp. RS-1] | | | | |
| 567, | RNA-binding protein [Cytophaga hutchinsonii ATCC | 1.11E+08 | 8.00E−40 | Cytophaga | Protein encoded by Prokaryotic |
| 568 | 33406] gi\|110281863\|gb\|ABG60049.1\|RNA-binding | | | hutchinsonii ATCC | essential gene #30232. |
| | protein [Cytophaga hutchinsonii ATCC 33406] | | | 33406 | |
| 569, | putative Beta-glucosidase A [Loktanella vestfoldensis | 84517375 | 0 | Loktanella | T. bispora NRRL 15568 beta- |
| 570 | SKA53] gi\|84508739\|gb\|EAQ05203.1\|putative Beta- | | | vestfoldensis SKA53 | glucosidase. |
| | glucosidase A [Loktanella vestfoldensis SKA53] | | | | |
| 571, | beta-glucosidase [Vibrio shilonii AK1] | 1.49E+08 | 1.00E−162 | Vibrio shilonii AK1 | Anti-biofilm polypetide #100. |
| 572 | gi\|148838481\|gb\|EDL55421.1\|beta-glucosidase [Vibrio | | | | |
| | shilonii AK1] | | | | |
| 573, | glycoside hydrolase, family 3-like [Acidobacteria | 94971178 | 1.00E−165 | Acidobacteria | Bacteroides fragilis strain 14062 |
| 574 | bacterium Ellin345] gi\|94553228\|gb\|ABF43152.1\| | | | bacterium Ellin345 | protein, SEQ: 5227. |
| | glycoside hydrolase, family 3-like [Acidobacteria | | | | |
| | bacterium Ellin345] | | | | |
| 575, | Beta-glucosidase [Thermoanaerobacter ethanolicus | 76795388 | 1.00E−147 | Thermoanaerobacter | Agrobacterium sp. bgls_agrsp strand- |
| 576 | ATCC 33223] gi\|76589196\|gb\|EAO65595.1\|Beta- | | | ethanolicus ATCC | glucosidase. |
| | glucosidase [Thermoanaerobacter ethanolicus ATCC | | | 33223 | |
| | 33223] | | | | |
| 577, | b-glucosidase, glycoside hydrolase family 3 protein | 1.49E+08 | 0 | Pedobacter sp. | Protein encoded by Prokaryotic |
| 578 | [Pedobacter sp. BAL39] gi\|149229614\|gb\|EDM35004.1\| | | | BAL39 | essential gene #30232. |
| | b-glucosidase, glycoside hydrolase family 3 protein | | | | |
| | [Pedobacter sp. BAL39] | | | | |
| 579, | glycoside hydrolase, family 1 [Salinispora tropica CNB- | 1.46E+08 | 0 | Salinispora tropica | T. bispora NRRL 15568 beta- |
| 580 | 440] gi\|145303444\|gb\|ABP54026.1\|beta-glucosidase. | | | CNB-440 | glucosidase. |
| | Glycosyl Hydrolase family 1. [Salinispora tropica CNB- | | | | |
| | 440] | | | | |
| 581, | glycoside hydrolase family 3 domain protein [Clostridium | 1.61E+08 | 0 | Clostridium | Enterococcus faecalis polypeptide #1. |
| 582 | phytofermentans ISDg] gi\|160427523\|gb\|ABX41086.1\| | | | phytofermentans | |
| | glycoside hydrolase family 3 domain protein [Clostridium | | | ISDg | |
| | phytofermentans ISDg] | | | | |
| 583, | glucan 1,4-beta-glucosidase precursor [Xanthomonas | 78047379 | 0 | Xanthomonas | Microbulbifer degradans cellulase |
| 584 | campestris pv. vesicatoria str. 85-10] | | | campestris pv. | system protein - SEQ ID 8. |
| | gi\|78035809\|emb\|CAJ23500.1\|glucan 1,4-beta- | | | vesicatoria str. 85-10 | |
| | glucosidase precursor [Xanthomonas campestris pv. | | | | |
| | vesicatoria str. 85-10] | | | | |
| 585, | b-glucosidase, glycoside hydrolase family 3 protein | 1.49E+08 | 0 | Pedobacter sp. | Bacteroides fragilis strain 14062 |
| 586 | [Pedobacter sp. BAL39] gi\|149229614\|gb\|EDM35004.1\| | | | BAL39 | protein, SEQ: 5227. |
| | b-glucosidase, glycoside hydrolase family 3 protein | | | | |
| | [Pedobacter sp. BAL39] | | | | |
| 587, | Beta-glucosidase [Caulobacter sp. K31] | 1.14E+08 | 0 | Caulobacter sp. K31 | Chimaeric thermostable beta- |
| 588 | gi\|113730277\|gb\|EAU11349.1\|Beta-glucosidase | | | | glucosidase. |
| | [Caulobacter sp. K31] | | | | |
| 589, | glycoside hydrolase, family 1 [Solibacter usitatus | 1.17E+08 | 1.00E−131 | Solibacter usitatus | Anti-biofilm polypeptide #100. |
| 590 | Ellin6076] gi\|116225047\|gb\|ABJ83756.1\|glycoside | | | Ellin6076 | |
| | hydrolase, family 1 [Solibacter usitatus Ellin6076] | | | | |
| 591, | Glycoside hydrolase, family 1 [Halothermothrix orenii H | 89211521 | 1.00E−117 | Halothermothrix orenii | Agrobacterium sp. bgls_agrsp strand- |
| 592 | 168] gi\|89158859\|gb\|EAR78546.1\|Glycoside hydrolase, | | | H 168 | glucosidase. |
| | family 1 [Halothermothrix orenii H 168] | | | | |
| 593, | Beta-glucosidase [Burkholderia sp. 383] | 78059828 | 0 | Burkholderia sp. 383 | Bacterial beta-hexosaminidase gene |
| 594 | gi\|77964378\|gb\|ABB05759.1\|Beta-glucosidase | | | | SEQ ID NO: 8. |
| | [Burkholderia sp. 383] | | | | |
| 595, | candidate b-glucosidase, Glycoside Hydrolase Family 3 | 1.64E+08 | 0 | Flavobacteriales | Bacteroides fragilis strain 14062 |
| 596 | protein [Flavobacteriales bacterium ALC-1] | | | bacterium ALC-1 | protein, SEQ: 5227. |
| | gi\|159877302\|gb\|EDP71359.1\|candidate b-glucosidase, | | | | |
| | Glycoside Hydrolase Family 3 protein [Flavobacteriales | | | | |
| | bacterium ALC-1] | | | | |
| 597, | EXOGLUCANASE II PRECURSOR | 121855 | 0 | Hypocrea jecorina | Hypocrea jecorina cellbionydrolase-2 |
| 598 | (EXOCELLOBIOHYDROLASE II) (CBHII) (1,4-BETA- | | | | (CBH2) SEQ ID NO 2. |
| | CELLOBIOHYDROLASE). | | | | |
| 599, | Exoglucanase 1 precursor (Exoglucanase I) | 50400675 | 0 | Trichoderma | PCR primer Mcbh1-N of the |
| 600 | (Exocellobiohydrolase I) (CBHI) (1,4-beta- | | | harzianum | specification. |
| | cellobiohydrolase) | | | | |
| | gi\|7107367\|gb\|AAF36391.1\|AF223252_1 | | | | |
| | cellobiohydrolase [Trichoderma harzianum] | | | | |
| 601, | hypothetical protein An12g02220 [Aspergillus niger] | 1.45E+08 | 0 | Aspergillus niger | A. fumigatus AfGOX3. |
| 602 | gi\|134080021\|emb\|CAK41068.1\|unnamed protein | | | | |
| | product [Aspergillus niger] | | | | |
| 603, | cellulose 1,4-beta-cellobiosidase [Acremonium | 1.57E+08 | 0 | Acremonium | Cellobiohydrolase I activity protein |
| 604 | thermophilum] | | | thermophilum | SEQ ID No 16. |
| 605, | EXOGLUCANASE I PRECURSOR | 729650 | 0 | Penicillium | Cellobiohydrolase I activity protein |
| 606 | (EXOCELLOBIOHYDROLASE I) (1,4-BETA- | | | janthinellum | SEQ ID No 16. |
| | CELLOBIOHYDROLASE). | | | | |
| 607, | hypothetical protein MGG_07809 [Magnaporthe grisea | 39973029 | 0 | Magnaporthe grisea | Cellobiohydrolase I activity protein |
| 608 | 70-15] gi\|145012585\|gb\|EDJ97239.1\|hypothetical | | | 70-15 | SEQ ID No 16. |
| | protein MGG_07809 [Magnaporthe grisea 70-15] | | | | |
| 609, | unnamed protein product [Aspergillus oryzae]. | 83770909 | 0 | Aspergillus oryzae | EP-897667 Seq ID 7. |
| 610 | | | | | |
| 611, | secreted hydrolase [Streptomyces coelicolor A3(2)] | 21224131 | 1.00E−116 | Streptomyces | Hypocrea jecorina AXE2 protein |
| 612 | gi\|2995294\|emb\|CAA18323.1\|putative secreted | | | coelicolor A3(2) | sequence SeqID15. |
| | hydrolase [Streptomyces coelicolor A3(2)] | | | | |
| 613, | endo-1,4-beta-glucanase b [Pyrococcus furiosus DSM | 18977226 | 1.00E−103 | Pyrococcus furiosus | Glucose isomerase SEQ ID NO 20. |
| 614 | 3638]. | | | DSM 3638 | |
| 615, | PUTATIVE EXOGLUCANASE TYPE C PRECURSOR | 1170141 | 0 | Fusarium oxysporum | Linking B region #8 derived from a |
| 616 | (EXOCELLOBIOHYDROLASE I) (1,4-BETA- | | | | (hemi)cellulose-degrading enzyme. |
| | CELLOBIOHYDROLASE) (BETA- | | | | |
| | GLUCANCELLOBIOHYDROLASE). | | | | |
| 617, | cellobiohydrolase [Irpex lacteus]. | 46395332 | 0 | Irpex lacteus | Cellobiohydrolase I activity protein |
| 618 | | | | | SEQ ID No 16. |
| 619, | cellobiohydrolase, putative [Aspergillus fumigatus Af293] | 70986018 | 0 | Aspergillus fumigatus | A. fumigatus AfGOX3. |
| 620 | gi\|66846140\|gb\|EAL86473.1\|cellobiohydrolase, putative | | | Af293 | |
| | [Aspergillus fumigatus Af293] | | | | |
| 621, | xylosidase/arabinosidase [Caulobacter crescentus]. | 16127284 | 0 | Caulobacter | Vibrio harveyi endoglucanase DNA. |
| 622 | | | | crescentus | |
| 623, | Beta-lactamase [Algoriphagus sp. PR1] | 1.27E+08 | 2.00E−97 | Algoriphagus sp. PR1 | Environmental isolate hydrolase, SEQ |
| 624 | gi\|126576725\|gb\|EAZ80973.1\|Beta-lactamase | | | | ID NO: 44. |
| | [Algoriphagus sp. PR1] | | | | |
| 625, | glycoside hydrolase, family 3 domain protein [Solibacter | 1.17E+08 | 0 | Solibacter usitatus | Vibrio harveyi endoglucanase DNA. |
| 626 | usitatus Ellin6076] gi\|116224959\|gb\|ABJ83668.1\| | | | Ellin6076 | |
| | glycoside hydrolase, family 3 domain protein [Solibacter | | | | |
| | usitatus Ellin6076] | | | | |
| 627, | hypothetical protein SNOG_01776 [Phaeosphaeria | 1.11E+08 | 1.00E−127 | Phaeosphaeria | Aspergillus fumigatus xylanase |
| 628 | nodorum SN15] | | | nodorum SN15 | mature protein #1. |
| 629, | endoxylanase [Alternaria alternata]. | 6179887 | 1.00E−140 | Alternaria alternata | Humicola insolens GH43 alpha-L- |
| 630 | | | | | arabinofuranosidase enzyme - SEQ |
| | | | | | ID 1. |
| 631, | hypothetical protein SNOG_08993 [Phaeosphaeria | 1.61E+08 | 0 | Phaeosphaeria | Aspergillus oryzae xylosidase. |
| 632 | nodorum SN15] | | | nodorum SN15 | |
| 633, | hypothetical protein SNOG_12988 [Phaeosphaeria | 1.61E+08 | 0 | Phaeosphaeria | Trichoderma reesei bgl1 gene. |
| 634 | nodorum SN15] | | | nodorum SN15 | |
| 635, | major extracellular beta-xylosidase [Cochliobolus | 3789946 | 0 | Cochliobolus | Microbulbifer degradans cellulase |
| 636 | carbonum]. | | | carbonum | system protein - SEQ ID 8. |
| 637, | hypothetical protein SNOG_00770 [Phaeosphaeria | 1.61E+08 | 0 | Phaeosphaeria | DNA encoding Aspergillus oryzae |
| 638 | nodorum SN15] | | | nodorum SN15 | endoglucanase. |
| 639, | Feruloyl esterase [Delftia acidovorans SPH-1] | 1.61E+08 | 7.00E−84 | Delftia acidovorans | Environmental isolate hydrolase, SEQ |
| 640 | gi\|160364556\|gb\|ABX36169.1\|Feruloyl esterase [Delftia | | | SPH-1 | ID NO: 44. |
| | acidovorans SPH-1] | | | | |
| 641, | hypothetical protein Mmcs_0784 [Mycobacterium sp. | 1.09E+08 | 2.00E−43 | Mycobacterium sp. | Environmental isolate hydrolase, SEQ |
| 642 | MCS] gi\|119866853\|ref\|YP_936805.1\|hypothetical | | | MCS | ID NO: 44. |
| | protein Mkms_0799 [Mycobacterium sp. KMS] | | | | |
| | gi\|108768182\|gb\|ABG06904.1\|hypothetical protein | | | | |
| | Mmcs_0784 [Mycobacterium sp. MCS] | | | | |
| | gi\|119692942\|gb\|ABL90015.1\|cons | | | | |
| 643, | Carboxylesterase, type B [Burkholderia phytofirmans | 1.18E+08 | 1.00E−112 | Burkholderia | Environmental isolate hydrolase, SEQ |
| 644 | PsJN] gi\|117992602\|gb\|EAV06893.1\|Carboxylesterase, | | | phytofirmans PsJN | ID NO: 44. |
| 645, | Beta-glucosidase [Sorangium cellulosum ‘So ce 56’] | 1.62E+08 | 1.00E−155 | Sorangium | Bacterial polypeptide #23667. |
| 646 | gi\|161163155\|emb\|CAN94460.1\|Beta-glucosidase | | | cellulosum ‘So ce 56 | |
| | [Sorangium cellulosum ‘So ce 56’] | | | | |
| 647, | alpha-glucuronidase [Xanthomonas campestris pv. | 78049889 | 0 | Xanthomonas | Microbulbifer degradans cellulase |
| 648 | vesicatoria str. 85-10] gi\|78038319\|emb\|CAJ26064.1\| | | | campestris pv. | system protein - SEQ ID 8. |
| | alpha-glucuronidase [Xanthomonas campestris pv. | | | vesicatoria str. 85-10 | |
| | vesicatoria str. 85-10] | | | | |
| 649, | hypothetical protein SNOG_11550 [Phaeosphaeria | 1.11E+08 | 1.00E−106 | Phaeosphaeria | Environmental isolate hydrolase, SEQ |
| 650 | nodorum SN15] | | | nodorum SN15 | ID NO: 44. |
| 651, | hypothetical protein SNOG_08802 [Phaeosphaeria | 1.61E+08 | 0 | Phaeosphaeria | Bacillus clausii alkaline protease |
| 652 | nodorum SN15] | | | nodorum SN15 | coding sequence - SEQ ID 58. |
| 653, | hypothetical protein BACOVA_04385 [Bacteroides | 1.61E+08 | 0 | Bacteroides ovatus | Microbulbifer degradans cellulase |
| 654 | ovatus ATCC 8483] gi\|156108260\|gb\|EDO10005.1\| | | | ATCC 8483 | system protein - SEQ ID 8. |
| | hypothetical protein BACOVA_04385 [Bacteroides | | | | |
| | ovatus ATCC 8483] | | | | |
| 655, | glycoside hydrolase family 43, candidate beta- | 1.5E+08 | 1.00E−148 | Bacteroides vulgatus | Microbulbifer degradans cellulase |
| 656 | xylosidase/alpha-L-arabinofuranosidase [Bacteroides | | | ATCC 8482 | system protein - SEQ ID 8. |
| | vulgatus ATCC 8482] gi\|149931072\|gb\|ABR37770.1\| | | | | |
| | glycoside hydrolase family 43, candidate beta- | | | | |
| | xylosidase/alpha-L-arabinofuranosidase [Bacteroides | | | | |
| | vulgatus AT | | | | |
| 657, | putative esterase [Solibacter usitatus Ellin6076] | 1.17E+08 | 1.00E−108 | Solibacter usitatus | Xylanase from an environmental |
| 658 | gi\|116225263\|gb\|ABJ83972.1\|putative esterase | | | Ellin6076 | sample seq id 14. |
| | [Solibacter usitatus Ellin6076] | | | | |
| 659, | hypothetical protein SNOG_04546 [Phaeosphaeria | 1.11E+08 | 1.00E−124 | Phaeosphaeria | S ambofaciens spiramycin |
| 660 | nodorum SN15] | | | nodorum SN15 | biosynthetic enzyme encoded by |
| | | | | | ORF10*. |
| 661, | alpha-L-arabinofuranosidase [Cochliobolus carbonum]. | 11991219 | 1.00E−149 | Cochliobolus | Xylanase from an environmental |
| 662 | | | | carbonum | sample seq id 14. |
| 663, | hypothetical protein CHGG_00304 [Chaetomium | 1.16E+08 | 1.00E−171 | Chaetomium | C. minitans novel xylanase Cxy1. |
| 664 | globosum CBS 148.51] gi\|88184601\|gb\|EAQ92069.1\| | | | globosum CBS | |
| | hypothetical protein CHGG_00304 [Chaetomium | | | 148.51 | |
| | globosum CBS 148.51] | | | | |
| 665, | cellulase [Cochliobolus carbonum]. | 13346198 | 1.00E−165 | Cochliobolus | Cel45A+Cellobiohydrolase I CBD |
| 666 | | | | carbonum | fusion construct PCR primer SEQ ID |
| | | | | | NO: 16. |
| 667, | hypothetical protein SNOG_15978 [Phaeosphaeria | 1.61E+08 | 0 | Phaeosphaeria | Aspergillus fumigatus Agl1 gene |
| 668 | nodorum SN15] | | | nodorum SN15 | reverse PCR primer, SEQ ID: 17 #1. |
| 669, | glycoside hydrolase, family 3 domain protein [Solibacter | 1.17E+08 | 0 | Solibacter usitatus | Bacteroides fragilis strain 14062 |
| 670 | usitatus Ellin6076] gi\|116224959\|gb\|ABJ83668.1\| | | | Ellin6076 | protein, SEQ: 5227. |
| | glycoside hydrolase, family 3 domain protein [Solibacter | | | | |
| | usitatus Ellin6076] | | | | |
| 671, | Xylan 1,4-beta-xylosidase [Sorangium cellulosum ‘So ce | 1.62E+08 | 0 | Sorangium | Bacillus clausii alkaline protease |
| 672 | 56’] gi\|161163742\|emb\|CAN95047.1\|Xylan 1,4-beta- | | | cellulosum ‘So ce 56 | coding sequence - SEQ ID 58. |
| | xylosidase [Sorangium cellulosum ‘So ce 56’] | | | | |
| 673, | Alpha-L-arabinofuranosidase [Geobacillus | 1.39E+08 | 0 | Geobacillus | Bacillus subtilis abfA gene product. |
| 674 | thermodenitrificans NG80-2] | | | thermodenitrificans | |
| | gi\|134266956\|gb\|ABO67151.1\|Alpha-L- | | | NG80-2 | |
| | arabinofuranosidase [Geobacillus thermodenitrificans | | | | |
| | NG80-2] | | | | |
| 675, | hypothetical protein COPEUT_01466 [Coprococcus | 1.64E+08 | 0 | Coprococcus | Bacterial polypeptide #23667. |
| 676 | eutactus ATCC 27759] gi\|158449501\|gb\|EDP26496.1\| | | | eutactus ATCC | |
| | hypothetical protein COPEUT_01466 [Coprococcus | | | 27759 | |
| | eutactus ATCC 27759] | | | | |
| 677, | Alpha-L-arabinofuranosidase [Caulobacter sp. K31] | 1.14E+08 | 1.00E−179 | Caulobacter sp. K31 | Bacterial polypeptide #23667. |
| 678 | gi\|113729409\|gb\|EAU10485.1\|Alpha-L- | | | | |
| | arabinofuranosidase [Caulobacter sp. K31] | | | | |
| 679, | intra-cellular xylanase [uncultured bacterium] | 31580723 | 1.00E−59 | uncultured bacterium | Xylanase from an environmental |
| 680 | | | | | sample seq id 14. |
| 681, | glycoside hydrolase, family 3 domain protein | 1.5E+08 | 0 | Clostridium | Monterey pine calnexin protein, SEQ |
| 682 | [Clostridium beijerinckii NCIMB 8052] | | | beijerinckii NCIMB | ID: 231. |
| | gi\|149906247\|gb\|ABR37080.1\|glycoside hydrolase, | | | 8052 | |
| | family 3 domain protein [Clostridium beijerinckii NCIMB | | | | |
| | 8052] | | | | |
| 683, | alpha-L-arabinofuranosidase A precursor [Bacteroides | 29345778 | 0 | Bacteroides | Streptomyces sp. arabinofuranosidase |
| 684 | thetaiotaomicron VPI-5482] | | | thetaiotaomicron VPI- | DNA SEQ ID NO: 2. |
| | gi\|29337671\|gb\|AAO75475.1\|alpha-L- | | | 5482 | |
| | arabinofuranosidase A precursor [Bacteroides | | | | |
| | thetaiotaomicron VPI-5482] | | | | |
| 685, | Alpha-L-arabinofuranosidase [Caulobacter sp. K31] | 1.14E+08 | 1.00E−179 | Caulobacter sp. K31 | Bacterial polypeptide #23667. |
| 686 | gi\|113729409\|gb\|EAU10485.1\|Alpha-L- | | | | |
| | arabinofuranosidase [Caulobacter sp. K31] | | | | |
| 687, | hypothetical protein CHGG_05597 [Chaetomium | 1.16E+08 | 1.00E−94 | Chaetomium | Xylanase from an environmental |
| 688 | globosum CBS 148.51] gi\|88181510\|gb\|EAQ88978.1\| | | | globosum CBS | sample seq id 14. |
| | hypothetical protein CHGG_05597 [Chaetomium | | | 148.51 | |
| | globosum CBS 148.51] | | | | |
| 689, | hypothetical protein SNOG_05090 [Phaeosphaeria | 1.11E+08 | 1.00E−169 | Phaeosphaeria | PCR primer for H. insolens Cel6B |
| 690 | nodorum SN15] | | | nodorum SN15 | fungal cellulase coding sequence. |
| 691, | cellulase., Cellulose 1,4-beta-cellobiosidase | 72162575 | 0 | Thermobifida fusca | Bacterial polypeptide #23667. |
| 692 | [Thermobifida fusca YX] | | | YX | |
| | gi\|2506384\|sp\|P26221\|GUN4_THEFU Endoglucanase | | | | |
| | E-4 precursor (Endo-1,4-beta-glucanase E-4) (Cellulase | | | | |
| | E-4) (Cellulase E4) gi\|1817723\|gb\|AAB42155.1\|beta- | | | | |
| | 1,4-endoglucanase precursor [Ther | | | | |
| 693, | beta-glucosidase [Vibrio shilonii AK1] | 1.49E+08 | 1.00E−163 | Vibrio shilonii AK1 | Anti-biofilm polypeptide #100. |
| 694 | gi\|148838481\|gb\|EDL55421.1\|beta-glucosidase [Vibrio | | | | |
| | shilonii AK1] | | | | |
| 695, | hypothetical protein BACOVA_00487 [Bacteroides | 1.61E+08 | 1.00E−147 | Bacteroides ovatus | Microbulbifer degradans cellulase |
| 696 | ovatus ATCC 8483] gi\|156112117\|gb\|EDO13862.1\| | | | ATCC 8483 | system protein - SEQ ID 8. |
| | hypothetical protein BACOVA_00487 [Bacteroides | | | | |
| | ovatus ATCC 8483] | | | | |
| 697, | hypothetical protein BACOVA_00487 [Bacteroides | 1.61E+08 | 1.00E−148 | Bacteroides ovatus | Microbulbifer degradans cellulase |
| 698 | ovatus ATCC 8483] gi\|156112117\|gb\|EDO13862.1\| | | | ATCC 8483 | system protein - SEQ ID 8. |
| | hypothetical protein BACOVA_00487 [Bacteroides | | | | |
| | ovatus ATCC 8483] | | | | |
| 699, | beta-xylosidase [Geobacillus stearothermophilus] | 1.14E+08 | 0 | Geobacillus | Anti-biofilm polypeptide #100. |
| 700 | | | | stearothermophilus | |
| 718, | Endo-1,4-beta-xylanase [Solibacter usitatus Ellin6076] | 1.17E+08 | 1.00E−102 | Solibacter usitatus | Xylanase from an environmental |
| 719 | gi\|116224961\|gb\|ABJ83670.1\|Endo-1,4-beta-xylanase | | | Ellin6076 | sample seq id 14. |
| | [Solibacter usitatus Ellin6076] | | | | |
| 720, | hypothetical protein SNOG_10385 [Phaeosphaeria | 1.61E+08 | 1.00E−141 | Phaeosphaeria | Bacterial polypeptide #23667. |
| 721 | nodorum SN15] | | | nodorum SN15 | |

| | Geneseq | | | Geneseq | | | | | | | |
|---|---|---|---|---|---|---|---|---|---|---|---|
| | Protein | Geneseq | | DNA | | | | | | | |
| SEQ ID | Accession | Protein | | Accession | Geneseq | Query DNA | Query Protein | Geneseq/NR | Gene-seq/NR | Geneseq/NR | Geneseq/NR |
| NO: | Code | Evalue | Geneseq DNA Description | Code | DNA Evalue | Length | Length | DNA Length | Protein Length | % ID Protein | % ID DNA |
| 1, 2 | AAW34989 | 4.00E−89 | Human GPCR protein SEQ ID NO: 68. | ADC87158 | 2.00E−25 | 3450 | 1149 | 0 | 1128 | 25 | |
| 3, 4 | ABR55182 | 1.00E−54 | VSP leader peptide. | ADU48436 | 3.00E−16 | 1356 | 451 | 0 | 456 | 56 | |
| 5, 6 | ABM95926 | 6.00E−52 | Ramoplanin biosynthetic ORF 20 protein. | AAL40781 | 0.016 | 1425 | 474 | 1374 | 457 | 63 | 68 |
| 7, 8 | AEJ60373 | 0 | pHSP-K38 plasmid 2.1 kb insertion encoded | AEA00493 | 4.00E−10 | 2205 | 734 | 0 | 824 | 62 | |
| | | | protein. | | | | | | | | |
| 9, 10 | AAG80266 | 1.00E−129 | Bacillus sp alkaline cellulase PCR primer SEQ | AAI69287 | 3.00E−08 | 2268 | 755 | 2250 | 749 | 87 | 87 |
| | | | ID 22. | | | | | | | | |
| 11, 12 | AAW34989 | 0 | Vibrio harveyi endoglucanase DNA. | AAT94197 | 0 | 3033 | 1010 | 0 | 791 | 44 | |
| 13, 14 | AAB70839 | 1.00E−129 | A. gossypii/S. halstedii fusion construct | AAF61508 | 1.00E−23 | 966 | 321 | 0 | 321 | 67 | |
| | | | containing cellulase DNA. | | | | | | | | |
| 15, 16 | AED12840 | 1.00E−160 | VSP leader peptide. | ADU48437 | 6.00E−42 | 1212 | 403 | 0 | 579 | 83 | |
| 17, 18 | ADN25704 | 0 | VSP leader peptide. | ADU48461 | 4.00E−42 | 2913 | 970 | 0 | 973 | 79 | |
| 19, 20 | AAW95602 | 7.00E−37 | Cancer/angiogenesis/fibrosis-related | ADN38999 | 0.057 | 1299 | 432 | 0 | 469 | 46 | |
| | | | polypeptide, SEQ ID NO: C395. | | | | | | | | |
| 21, 22 | AAR77395 | 0 | Full length Bacillus sp. alkaline cellulase. | AAQ94350 | 8.00E−43 | 2550 | 849 | 0 | 941 | 63 | |
| 23, 24 | ABR55182 | 1.00E−66 | Saccharothrix australiensis endo-beta-1,4- | AAX07410 | 1.00E−11 | 1095 | 364 | 0 | 536 | 51 | |
| | | | glucanase gene. | | | | | | | | |
| 25, 26 | ABR55182 | 2.00E−64 | Nanchangmycin biosynthesis protein NanA9. | ADV99887 | 0.19 | 1098 | 365 | 0 | 329 | 40 | |
| 27, 28 | AAY00865 | 5.00E−72 | Acidothermus cellulolyticus E1 cellulase (E1 | ADA41757 | 3.00E−17 | 600 | 199 | 0 | 529 | 68 | |
| | | | beta-1,4-endoglucanase) DNA. | | | | | | | | |
| 29, 30 | ABJ26902 | 0 | Cellobiohydrolase I activity protein SEQ ID No | ABT23540 | 2.00E−24 | 1605 | 534 | 0 | 529 | 76 | |
| | | | 16. | | | | | | | | |
| 31, 32 | AAY00865 | 0 | Cellobiohydrolase CBH protein fragment. | AAX22095 | 0 | 1611 | 536 | 1611 | 536 | 96 | 92 |
| 33, 34 | AAW57419 | 0 | Cellobiohydrolase I (CBH1) mutant S92T. | ADK81787 | 1.00E−119 | 1515 | 504 | 0 | 505 | 95 | |
| 35, 36 | AAY01076 | 1.00E−102 | Human OPG (osteoprotegerin) K108N protein | ABS54850 | 1.00E−113 | 1350 | 449 | 0 | 394 | 65 | |
| | | | mutant. | | | | | | | | |
| 37, 38 | ADR90316 | 0 | Clostridium josui cellulose degrading cellulase D | ADR90304 | 3.00E−17 | 2226 | 741 | 0 | 741 | 100 | |
| | | | protein. | | | | | | | | |
| 39, 40 | ADR90316 | 0 | VSP leader peptide. | ADU48461 | 4.00E−05 | 3087 | 1028 | 0 | 914 | 59 | |
| 41, 42 | AEF04603 | 3.00E−55 | Novel signal transduction pathway protein, Seq | AAS27844 | 1 | 1485 | 494 | 0 | 499 | 28 | |
| | | | ID 1065. | | | | | | | | |
| 43, 44 | AEF20904 | 1.00E−118 | Rice abiotic stress responsive polypeptide SEQ | ACL28429 | 0.083 | 1854 | 617 | 0 | 1118 | 39 | |
| | | | ID NO: 4152. | | | | | | | | |
| 45, 46 | AEB48738 | 4.00E−48 | SigA2 without bla gene amplifying PCR primer, | AEB45527 | 9.00E−06 | 3006 | 1001 | 3162 | 1053 | 48 | 58 |
| | | | SigA2NotD-P, SEQ ID NO: 52. | | | | | | | | |
| 47, 48 | AEF20904 | 1.00E−118 | Pseudomonas aeruginosa polypeptide #3. | ABD04307 | 0.079 | 1755 | 584 | 489 | 616 | | |
| 49, 50 | AEF04613 | 2.00E−62 | DNA encoding novel human diagnostic protein | AAS73981 | 3.4 | 1251 | 416 | 0 | 499 | 39 | |
| | | | #20574. | | | | | | | | |
| 51, 52 | AEF20904 | 0 | Xylanase from an environmental sample seq id | ADJ35073 | 1.00E−06 | 1740 | 579 | 1761 | 586 | 69 | 72 |
| | | | 14. | | | | | | | | |
| 53, 54 | AAB08774 | 6.00E−74 | Candida essential gene related knockout PCR | ABZ31950 | 9.00E−04 | 1227 | 408 | 0 | 517 | 38 | |
| | | | primer SEQ ID NO 1717. | | | | | | | | |
| 55, 56 | AAB08774 | 5.00E−68 | Sequence of modified xylanase cDNA in clone | AAQ55036 | 5.00E−05 | 1203 | 400 | 1113 | 370 | 41 | 48 |
| | | | pNX-Tac. | | | | | | | | |
| 57, 58 | AEF20904 | 1.00E−120 | Plant transcription factor #1. | ADI42569 | 0.079 | 1755 | 584 | 656 | 616 | | |
| 59, 60 | AED55949 | 2.00E−45 | Maize sugary1 (SU1) exon 8. | AAD42891 | 0.052 | 1179 | 392 | 11779 | 294 | | |
| 61, 62 | AEF20904 | 1.00E−118 | Bacterial polypeptide #10001. | ADS56142 | 0.31 | 1749 | 582 | 0 | 1118 | 41 | |
| 63, 64 | AEF20904 | 1.00E−120 | M. xanthus protein sequence, seq id 9726. | ACL64233 | 1.2 | 1755 | 584 | 4039 | 616 | | |
| 65, 66 | AAE09784 | 2.00E−62 | Serine protease inhibitor gene fragment | AAI67579 | 0.86 | 1245 | 414 | 0 | 499 | 35 | |
| | | | constructing oligo Ab4. | | | | | | | | |
| 67, 68 | AAE09784 | 5.00E−51 | Drosophila melanogaster polypeptide SEQ ID | ABL29670 | 0.18 | 1032 | 343 | 4861 | 395 | | |
| | | | NO 24465. | | | | | | | | |
| 69, 70 | ADR51307 | 7.00E−23 | Equine herpesvirus 4 genome gM deletion | ADP74202 | 0.72 | 1059 | 352 | 0 | 350 | 46 | |
| | | | mutant #1. | | | | | | | | |
| 71, 72 | AAO15063 | 8.00E−44 | Drosophila melanogaster polypeptide SEQ ID | ABL15730 | 0.063 | 1410 | 469 | 10855 | 245 | | |
| | | | NO 24465. | | | | | | | | |
| 73, 74 | AEF04613 | 2.00E−73 | Gene sequence #SEQ ID 1448. | ACC60703 | 0.85 | 1239 | 412 | 2000 | 483 | | |
| 75, 76 | AEF20904 | 1.00E−118 | Rice abiotic stress responsive polypeptide SEQ | ACL34117 | 0.31 | 1755 | 584 | 1047 | 616 | | |
| | | | ID NO: 4152. | | | | | | | | |
| 77, 78 | ABP99336 | 5.00E−28 | Bacterial polypeptide #10001. | ADS58419 | 0.05 | 1140 | 379 | 0 | 492 | 27 | |
| 79, 80 | AEF04613 | 2.00E−63 | Neisseria meningitidis BASB043 gene PCR | AAA49606 | 3.4 | 1251 | 416 | 0 | 499 | 38 | |
| | | | primer lip7-Fm/p. | | | | | | | | |
| 81, 82 | AEB48738 | 4.00E−47 | SigA2 without bla gene amplifying PCR primer, | AEB45527 | 0.002 | 2895 | 964 | 3162 | 1053 | 48 | 59 |
| | | | SigA2NotD-P, SEQ ID NO: 52. | | | | | | | | |
| 83, 84 | AEF04613 | 3.00E−66 | Chemically treated cell signalling DNA | ABL70624 | 0.22 | 1266 | 421 | 6045 | 483 | | |
| | | | sequence#234. | | | | | | | | |
| 85, 86 | AEF20904 | 1.00E−118 | Rice abiotic stress responsive polypeptide SEQ | ACL34117 | 0.31 | 1755 | 584 | 1047 | 616 | | |
| | | | ID NO: 4152. | | | | | | | | |
| 87, 88 | AEF04613 | 7.00E−73 | Human protein encoded by clone | ADB62035 | 0.87 | 1257 | 418 | 2408 | 483 | | |
| | | | ADRGL20047080. | | | | | | | | |
| 89, 90 | AAW56742 | 2.00E−85 | Human prostate expressed polynucleotide SEQ | ABQ88968 | 1.8 | 2484 | 827 | 0 | 814 | 98 | |
| | | | ID NO 803. | | | | | | | | |
| 91, 92 | ADR90316 | 0 | Clostridium josui cellulose degrading cellulase D | ADR90304 | 1.00E−07 | 2274 | 757 | 0 | 741 | 58 | |
| | | | protein. | | | | | | | | |
| 93, 94 | ADR90316 | 0 | Clostridium josui cellulose degrading cellulase D | ADR90304 | 5.00E−07 | 2736 | 911 | 0 | 914 | 65 | |
| | | | protein. | | | | | | | | |
| 95, 96 | ADR90316 | 1.00E−171 | Bacillus licheniformis genomic sequence tag | ABK75466 | 0.009 | 3003 | 1000 | 3276 | 1091 | 67 | 64 |
| | | | (GST) #933. | | | | | | | | |
| 97, 98 | ADR90316 | 1.00E−180 | VSP leader peptide. | ADU48461 | 2.00E−06 | 2091 | 696 | 0 | 854 | 54 | |
| 99, 100 | AED12836 | 0 | VSP leader peptide. | ADU48461 | 0.022 | 1935 | 644 | 0 | 642 | 68 | |
| 101, 102 | AED12836 | 0 | VSP leader peptide. | ADU48461 | 0.022 | 1935 | 644 | 0 | 642 | 68 | |
| 103, 104 | AEH81849 | 4.00E−56 | Pseudomonas aeruginosa polypeptide #3. | ABD11041 | 0.091 | 2010 | 669 | 3084 | 638 | | |
| 105, 106 | AAB08774 | 2.00E−68 | Sequence of modified xylanase cDNA in clone | AAQ55036 | 7.00E−04 | 1005 | 334 | 0 | 517 | 43 | |
| | | | pNX-Tac. | | | | | | | | |
| 107, 108 | AAW44272 | 2.00E−45 | Plant full length insert polynucleotide seqid | ADX53655 | 4.5 | 1647 | 548 | 1776 | 304 | | |
| | | | 4980. | | | | | | | | |
| 109, 110 | AED46544 | 3.00E−32 | Human chemically modified disease associated | ABN80170 | 1 | 1473 | 490 | 1914 | 637 | 17 | 46 |
| | | | gene SEQ ID NO 49. | | | | | | | | |
| 111, 112 | AAB08774 | 4.00E−81 | Rice isoprenoid biosynthesis-associated protein | ADI45632 | 3.6 | 1335 | 444 | 0 | 515 | 40 | |
| | | | #5. | | | | | | | | |
| 113, 114 | AAB08774 | 1.00E−62 | Rice BAC65990.1 protein. | ADV34235 | 0.012 | 1116 | 371 | 1113 | 370 | 39 | 52 |
| 115, 116 | ABP71656 | 3.00E−72 | TokcelR primer used to isolate Tok7B.1 celE | AAD26525 | 5.00E−17 | 939 | 312 | 0 | 1742 | 69 | |
| | | | gene. | | | | | | | | |
| 117, 118 | AEF04603 | 3.00E−68 | Snake venom protease peptide fragment. | ADG83825 | 0.79 | 1152 | 383 | 1407 | 528 | | |
| 119, 120 | AEF04603 | 1.00E−61 | Cryptosporidium hominis protein SEQ ID NO: 2. | AEH38555 | 0.19 | 1104 | 367 | 0 | 499 | 39 | |
| 121, 122 | AAW12381 | 2.00E−92 | Human breast cancer expressed polynucleotide | AAL24695 | 0.71 | 1047 | 348 | 912 | 411 | | |
| | | | 8440. | | | | | | | | |
| 123, 124 | AAW35004 | 1.00E−67 | Novel mar regulated protein (NIMR) #29. | AAS46239 | 4.1 | 1500 | 499 | 0 | 733 | 48 | |
| 125, 126 | AAW35002 | 4.00E−27 | Prokaryotic essential gene #34740. | ACA29992 | 0.73 | 1068 | 355 | 1074 | 357 | 48 | 57 |
| 127, 128 | AAW35002 | 4.00E−28 | Arabidopsis thaliana polynucleotide SEQ ID NO | ABQ65654 | 2.9 | 1068 | 355 | 1074 | 357 | 48 | 56 |
| | | | 197. | | | | | | | | |
| 129, 130 | AED46544 | 7.00E−34 | Cancer-associated protein SEQ ID NO: 19. | AEE04805 | 0.29 | 1641 | 546 | 0 | 365 | 18 | |
| 131, 132 | AAE09784 | 1.00E−62 | Prokaryotic essential gene #34740. | ACA45703 | 3.4 | 1236 | 411 | 0 | 499 | 37 | |
| 133, 134 | AAB08774 | 3.00E−81 | Cow cellulase DNA clones pBKRR 2 and | AEF04597 | 0.28 | 1587 | 528 | 0 | 515 | 36 | |
| | | | pBKRR 16 SEQ ID NO: 3. | | | | | | | | |
| 135, 136 | ADR90316 | 0 | VSP leader peptide. | ADU48458 | 4.00E−07 | 2184 | 727 | 0 | 722 | 58 | |
| 137, 138 | ADN25704 | 0 | A. cellulolyticus Gux1 protein FN_III domain | ABZ76162 | 5.00E−32 | 2916 | 971 | 0 | 973 | 86 | |
| | | | fragment. | | | | | | | | |
| 139, 140 | ADN25704 | 0 | VSP leader peptide. | ADU48461 | 2.00E−28 | 2916 | 971 | 0 | 973 | 81 | |
| 141, 142 | AEF04613 | 5.00E−59 | P. pabuli xyloglucanase XYG1022 DNA | AAD16817 | 0.2 | 1134 | 377 | 0 | 499 | 37 | |
| | | | amplifying PCR primer 189585. | | | | | | | | |
| 143, 144 | AEF04603 | 9.00E−58 | Murine cancer-associated genomic DNA #5. | ADZ13443 | 0.9 | 1308 | 435 | 0 | 499 | 32 | |
| 145, 146 | AEF20904 | 1.00E−119 | Human NURR1-related protein sequence, SEQ | ADB84032 | 4.8 | 1752 | 583 | 0 | 1118 | 42 | |
| | | | ID 79. | | | | | | | | |
| 147, 148 | AAR47496 | 5.00E−81 | Sequence of modified xylanase cDNA in clone | AAQ55036 | 0.019 | 1677 | 558 | 0 | 515 | 34 | |
| | | | pNX-Tac. | | | | | | | | |
| 149, 150 | ADR90317 | 9.00E−76 | Aspergillus fumigatus essential gene protein | ADR84393 | 0.052 | 1188 | 395 | 1113 | 370 | 40 | 51 |
| | | | #10. | | | | | | | | |
| 151, 152 | AEF20904 | 1.00E−119 | M. xanthus protein sequence, seq id 9726. | ACL64233 | 1.2 | 1755 | 584 | 0 | 616 | 42 | |
| 153, 154 | AAB08774 | 1.00E−80 | H. pylori GHPO 1099 gene. | AAX14099 | 0.089 | 1971 | 656 | 0 | 515 | 28 | |
| 155, 156 | AEF20904 | 1.00E−118 | Rice abiotic stress responsive polypeptide SEQ | ACL34117 | 0.32 | 1782 | 593 | 0 | 616 | 40 | |
| | | | ID NO: 4152. | | | | | | | | |
| 157, 158 | AAB08774 | 1.00E−80 | H. pylori GHPO 1099 gene. | AAX14099 | 0.089 | 1971 | 656 | 0 | 515 | 28 | |
| 159, 160 | AEF04613 | 4.00E−69 | Chemically treated cell signalling DNA | ABL70624 | 0.056 | 1266 | 421 | 6045 | 483 | | |
| | | | sequence#234. | | | | | | | | |
| 161, 162 | AAW53973 | 2.00E−49 | Arabidopsis thaliana protein, SEQ ID 1971. | ADA71052 | 0.004 | 1545 | 514 | 2934 | 234 | | |
| 163, 164 | AAR90715 | 1.00E−174 | VSP leader peptide. | ADU48437 | 3.00E−25 | 1476 | 491 | 0 | 579 | 79 | |
| 165, 166 | AAR90715 | 0 | Thermostable cellulase-E3 catalytic domain. | AAT15596 | 5.00E−37 | 1722 | 573 | 0 | 569 | 84 | |
| 167, 168 | AAB08774 | 1.00E−85 | Sequence of modified xylanase cDNA in clone | AAQ55036 | 6.1 | 2199 | 732 | 0 | 515 | 26 | |
| | | | pNX-Tac. | | | | | | | | |
| 169, 170 | ADR90316 | 0 | Clostridium josui cellulose degrading cellulase D | ADR90304 | 2.00E−06 | 3066 | 1021 | 0 | 914 | 61 | |
| | | | protein. | | | | | | | | |
| 171, 172 | ADR90316 | 0 | Clostridium josui cellulose degrading cellulase D | ADR90304 | 7.00E−43 | 2157 | 718 | 0 | 722 | 75 | |
| | | | protein. | | | | | | | | |
| 173, 174 | ADR90316 | 0 | Clostridium josui cellulose degrading cellulase D | ADR90304 | 2.00E−10 | 3009 | 1002 | 0 | 914 | 59 | |
| | | | protein. | | | | | | | | |
| 175, 176 | ADR90316 | 0 | Clostridium josui cellulose degrading cellulase D | ADR90304 | 0.002 | 2646 | 881 | 0 | 914 | 67 | |
| | | | protein. | | | | | | | | |
| 177, 178 | ABP71656 | 0 | A. cellulolyticus Gux1 protein FN_III domain | ABZ76162 | 2.00E−28 | 2589 | 862 | 0 | 1121 | 61 | |
| | | | fragment. | | | | | | | | |
| 179, 180 | ABP71656 | 0 | A. cellulolyticus Gux1 protein FN_III domain | ABZ76162 | 2.00E−11 | 4806 | 1601 | 0 | 973 | 32 | |
| | | | fragment. | | | | | | | | |
| 181, 182 | AED12840 | 1.00E−142 | VSP leader peptide. | ADU48437 | 4.00E−34 | 1455 | 484 | 0 | 569 | 55 | |
| 183, 184 | AAR90715 | 0 | Thermostable cellulase-E3 catalytic domain. | AAT15596 | 7.00E−33 | 1761 | 586 | 0 | 579 | 60 | |
| 185, 186 | AAR90715 | 0 | Thermostable cellulase-E3 catalytic domain. | AAT15596 | 1.00E−37 | 1749 | 582 | 0 | 569 | 65 | |
| 187, 188 | ADR90316 | 0 | Clostridium josui cellulose degrading cellulase D | ADR90304 | 3.00E−11 | 2676 | 891 | 0 | 914 | 59 | |
| | | | protein. | | | | | | | | |
| 189, 190 | ABP71656 | 0 | A. cellulolyticus Gux1 protein FN_III domain | ABZ76162 | 2.00E−11 | 4806 | 1601 | 0 | 973 | 32 | |
| | | | fragment. | | | | | | | | |
| 191, 192 | ABR55182 | 8.00E−67 | Non-reducing saccharide-forming enzyme | AAA10516 | 0.18 | 1035 | 344 | 0 | 382 | 45 | |
| | | | amino acid sequence. | | | | | | | | |
| 193, 194 | ABP71656 | 0 | VSP leader peptide. | ADU48461 | 5.00E−04 | 2700 | 899 | 0 | 854 | 56 | |
| 195, 196 | ADN25704 | 0 | VSP leader peptide. | ADU48461 | 2.00E−31 | 2916 | 971 | 0 | 973 | 84 | |
| 197, 198 | ABR55182 | 3.00E−54 | A. gossypii/S. halstedii fusion construct | AAF61508 | 6.00E−07 | 855 | 284 | 0 | 332 | 46 | |
| | | | containing cellulase DNA. | | | | | | | | |
| 199, 200 | ABR55182 | 5.00E−55 | A. gossypii/S. halstedii fusion construct | AAF61508 | 6.00E−07 | 855 | 284 | 0 | 332 | 46 | |
| | | | containing cellulase DNA. | | | | | | | | |
| 201, 202 | ABM95926 | 3.00E−25 | Mouse stress related vesicle protein, SERP1. | ADP42994 | 4 | 1461 | 486 | 0 | 469 | 49 | |
| 203, 204 | ABM95926 | 3.00E−25 | Mouse stress related vesicle protein, SERP1. | ADP42994 | 4 | 1461 | 486 | 0 | 469 | 49 | |
| 205, 206 | AEF20904 | 1.00E−129 | X campestris umce19A cellulase gene SeqID1. | AEF20903 | 3.00E−04 | 1746 | 581 | 0 | 586 | 43 | |
| 207, 208 | ABP71656 | 0 | VSP leader peptide. | ADU48461 | 1.00E−16 | 2028 | 675 | 0 | 973 | 61 | |
| 209, 210 | AAB70839 | 9.00E−37 | Prokaryotic essential gene #34740. | ACA27085 | 0.014 | 1287 | 428 | 0 | 469 | 54 | |
| 211, 212 | AEF20904 | 1.00E−134 | Microbulbifer degradans cellulase system | AEH81863 | 0.019 | 1674 | 557 | 0 | 616 | 45 | |
| | | | protein - SEQ ID 8. | | | | | | | | |
| 213, 214 | AAB08774 | 6.00E−81 | Human cancer-associated protein HP13-036.1. | ABD32968 | 1.1 | 1587 | 528 | 0 | 515 | 35 | |
| 215, 216 | ABR55182 | 2.00E−70 | Nanchangmycin biosynthesis protein NanA9. | ADV99887 | 5.00E−05 | 1053 | 350 | 0 | 341 | 46 | |
| 217, 218 | ABR55182 | 7.00E−58 | Nanchangmycin biosynthesis protein NanA9. | ADV99887 | 0.003 | 1104 | 367 | 0 | 329 | 37 | |
| 219, 220 | ABR55182 | 3.00E−58 | Nanchangmycin biosynthesis protein NanA9. | ADV99887 | 0.003 | 1104 | 367 | 0 | 329 | 37 | |
| 221, 222 | AAR90715 | 0 | Thermostable cellulase-E3 catalytic domain. | AAT15596 | 7.00E−33 | 1710 | 569 | 0 | 569 | 74 | |
| 223, 224 | AAR90715 | 0 | Thermostable cellulase-E3 catalytic domain. | AAT15596 | 7.00E−33 | 1710 | 569 | 0 | 569 | 74 | |
| 225, 226 | AAR90715 | 0 | Thermostable cellulase-E3 catalytic domain. | AAT15596 | 3.00E−29 | 1725 | 574 | 0 | 569 | 72 | |
| 227, 228 | AAR90715 | 0 | Thermostable cellulase-E3 catalytic domain. | AAT15596 | 7.00E−30 | 1743 | 580 | 0 | 569 | 72 | |
| 229, 230 | AAR90715 | 0 | Thermostable cellulase-E3 catalytic domain. | AAT15596 | 3.00E−29 | 1743 | 580 | 0 | 569 | 72 | |
| 231, 232 | AEF20904 | 1.00E−117 | Xylanase from an environmental sample seq id | ADJ34889 | 0.091 | 2010 | 669 | 2007 | 668 | 72 | 71 |
| | | | 14. | | | | | | | | |
| 233, 234 | AEF04603 | 3.00E−66 | Drosophila melanogaster polypeptide SEQ ID | ABL08153 | 0.86 | 1251 | 416 | 0 | 499 | 35 | |
| | | | NO 24465. | | | | | | | | |
| 235, 236 | ABR55182 | 3.00E−58 | Nanchangmycin biosynthesis protein NanA9. | ADV99887 | 0.003 | 1101 | 366 | 0 | 329 | 38 | |
| 237, 238 | ABR55182 | 3.00E−58 | Nanchangmycin biosynthesis protein NanA9. | ADV99887 | 0.003 | 1101 | 366 | 0 | 329 | 38 | |
| 239, 240 | ABR55182 | 2.00E−58 | Nanchangmycin biosynthesis protein NanA9. | ADV99887 | 0.003 | 1101 | 366 | 0 | 329 | 38 | |
| 241, 242 | ABP71656 | 0 | VSP leader peptide. | ADU48461 | 0.12 | 2550 | 849 | 0 | 854 | 96 | |
| 243, 244 | AAW95602 | 1.00E−29 | Nanchangmycin biosynthesis protein NanA9. | ADV99887 | 7.00E−05 | 1437 | 478 | 0 | 469 | 47 | |
| 245, 246 | AEH81862 | 1.00E−117 | Rice abiotic stress responsive polypeptide SEQ | ACL29091 | 0.079 | 1758 | 585 | 0 | 578 | 41 | |
| | | | ID NO: 4152. | | | | | | | | |
| 247, 248 | AEF20904 | 1.00E−117 | Bacterial polypeptide #10001. | ADS56142 | 0.001 | 1860 | 619 | 2640 | 616 | | |
| 249, 250 | AAB08774 | 2.00E−80 | Rice abiotic stress responsive polypeptide SEQ | ACL26500 | 1.2 | 1677 | 558 | 0 | 515 | 32 | |
| | | | ID NO: 4152. | | | | | | | | |
| 251, 252 | AAW48419 | 2.00E−48 | PCR primer used to amplify an ORF of | AAX91990 | 0.023 | 2016 | 671 | 1230025 | 527 | | |
| | | | Chlamydia pneumoniae. | | | | | | | | |
| 253, 254 | ABP71656 | 0 | A. cellulolyticus Gux1 protein FN_III domain | ABZ76162 | 4.00E−17 | 2529 | 842 | 0 | 854 | 61 | |
| | | | fragment. | | | | | | | | |
| 255, 256 | ABP71656 | 0 | A. cellulolyticus Gux1 protein FN_III domain | ABZ76162 | 2.00E−15 | 2547 | 848 | 0 | 854 | 60 | |
| | | | fragment. | | | | | | | | |
| 257, 258 | ABP71656 | 0 | A. cellulolyticus Gux1 protein FN_III domain | ABZ76162 | 9.00E−15 | 2541 | 846 | 0 | 854 | 60 | |
| | | | fragment. | | | | | | | | |
| 259, 260 | ABP71656 | 0 | A. cellulolyticus Gux1 protein FN_III domain | ABZ76162 | 3.00E−14 | 2535 | 844 | 0 | 854 | 61 | |
| | | | fragment. | | | | | | | | |
| 261, 262 | ADJ35112 | 6.00E−70 | Bacillus subtilis pelA protein sequence SeqID8. | ADO55906 | 8.00E−08 | 1608 | 535 | 1906 | 635 | 47 | 50 |
| 263, 264 | ABP71656 | 0 | A. cellulolyticus Gux1 protein FN_III domain | ABZ76162 | 2.00E−15 | 2523 | 840 | 0 | 854 | 61 | |
| | | | fragment. | | | | | | | | |
| 265, 266 | ABU20587 | 2.00E−06 | Bacteriophage 96 ORF RBS sequence | AAA68609 | 0.63 | 933 | 310 | 0 | 210 | 26 | |
| | | | 96ORF241. | | | | | | | | |
| 267, 268 | ABB80166 | 0 | A. fumigatus AfGOX3. | ABQ80324 | 1.00E−107 | 1422 | 473 | 0 | 468 | 78 | |
| 269, 270 | AED46544 | 3.00E−36 | Oligonucleotide for detecting cytosine | ABQ37581 | 0.18 | 1032 | 343 | 0 | 365 | 29 | |
| | | | methylation SEQ ID NO 20311. | | | | | | | | |
| 271, 272 | AED46544 | 3.00E−35 | Plant full length insert polynucleotide seqid | ADX28493 | 1.2 | 1704 | 567 | 1914 | 637 | 12 | 43 |
| | | | 4980. | | | | | | | | |
| 273, 274 | ADS21197 | 8.00E−57 | Mycobacterium tuberculosis strain H37Rv | AAI99682 | 0.089 | 1977 | 658 | 1368 | 455 | 24 | 33 |
| | | | genome SEQ ID NO 2. | | | | | | | | |
| 275, 276 | AED46544 | 1.00E−33 | Human protein sequence hCP39072. | ACN44892 | 1.2 | 1704 | 567 | 1914 | 637 | 14 | 44 |
| 277, 278 | AED46544 | 9.00E−32 | Plasmid pHM1519 origin of replication fragment | ADO05573 | 1.00E−08 | 921 | 306 | 0 | 365 | 29 | |
| | | | amplifying primer. | | | | | | | | |
| 279, 280 | AED46544 | 4.00E−35 | Human chemically modified disease associated | ABN80170 | 1.2 | 1692 | 563 | 1914 | 637 | 14 | 44 |
| | | | gene SEQ ID NO 49. | | | | | | | | |
| 281, 282 | AEJ12745 | 0 | Cellobiohydrolase II, SEQ ID 2. | ADP84825 | 1.00E−21 | 1407 | 468 | 0 | 458 | 71 | |
| 283, 284 | ADS21197 | 2.00E−55 | Arabidopsis thaliana protein, SEQ ID 1971. | ADA73281 | 1.3 | 1887 | 628 | 1368 | 455 | 24 | 33 |
| 285, 286 | ADS21197 | 2.00E−75 | Type II diabetes gene SEQ ID NO 7. | ADT77142 | 0.69 | 1020 | 339 | 0 | 1302 | 46 | |
| 287, 288 | AAU79549 | 1.00E−126 | Bacterial polypeptide #10001. | ADS63386 | 0.008 | 2823 | 940 | 0 | 2312 | 50 | |
| 289, 290 | AED46544 | 8.00E−36 | Prokaryotic essential gene #34740. | ACA52811 | 1.2 | 1704 | 567 | 1914 | 637 | 14 | 43 |
| 291, 292 | AEH81862 | 1.00E−85 | Maize carbon assimilation pathway enzyme | ADP59233 | 0.29 | 1638 | 545 | 0 | 547 | 37 | |
| | | | cDNA #19. | | | | | | | | |
| 293, 294 | AEF20904 | 5.00E−89 | Human cDNA clone (3′-primer) SEQ ID | AAH17050 | 0.073 | 1635 | 544 | 0 | 547 | 38 | |
| | | | NO: 5589. | | | | | | | | |
| 295, 296 | AEF20904 | 1.00E−127 | Microbulbifer degradans cellulase system | AEH81863 | 0.33 | 1857 | 618 | 2007 | 668 | 42 | 51 |
| | | | protein - SEQ ID 8. | | | | | | | | |
| 297, 298 | AEF20904 | 1.00E−131 | X campestris umce19A cellulase gene SeqID1. | AEF20903 | 3.00E−04 | 1722 | 573 | 1761 | 586 | 44 | 50 |
| 299, 300 | AEF20904 | 1.00E−130 | Microbulbifer degradans cellulase system | AEH81863 | 8.00E−05 | 1746 | 581 | 1761 | 586 | 44 | 50 |
| | | | protein - SEQ ID 8. | | | | | | | | |
| 301, 302 | AEF20904 | 1.00E−130 | X campestris umce19A cellulase gene SeqID1. | AEF20903 | 3.00E−04 | 1743 | 580 | 0 | 586 | 44 | |
| 303, 304 | AEF20904 | 1.00E−130 | Microbulbifer degradans cellulase system | AEH81863 | 0.31 | 1737 | 578 | 2007 | 668 | 45 | 54 |
| | | | protein - SEQ ID 8. | | | | | | | | |
| 305, 306 | AEH81835 | 3.00E−62 | Drosophila melanogaster polypeptide SEQ ID | ABL10402 | 0.29 | 1623 | 540 | 16962 | 1167 | | |
| | | | NO 24465. | | | | | | | | |
| 307, 308 | AEH81835 | 3.00E−63 | Soybean polymorphic locus, SEQ ID 6. | AEI27639 | 0.073 | 1641 | 546 | 1439 | 1167 | | |
| 309, 310 | AEF20904 | 9.00E−80 | Xylanase from an environmental sample seq id | ADJ35073 | 0.074 | 1647 | 548 | 0 | 547 | 35 | |
| | | | 14. | | | | | | | | |
| 311, 312 | AEH81835 | 1.00E−68 | Microbulbifer degradans cellulase system | AEH81836 | 0.018 | 1569 | 522 | 3504 | 1167 | | |
| | | | protein - SEQ ID 8. | | | | | | | | |
| 313, 314 | AAW48419 | 7.00E−37 | Drosophila melanogaster polypeptide SEQ ID | ABL12476 | 0.92 | 1332 | 443 | 4154 | 527 | | |
| | | | NO 24465. | | | | | | | | |
| 315, 316 | AAR90715 | 0 | Thermostable cellulase-E3 catalytic domain. | AAT15595 | 2.00E−30 | 1734 | 577 | 0 | 579 | 95 | |
| 317, 318 | ADC73058 | 3.00E−89 | Trametes hirsuta cellulolytic enzyme-related | ADC73057 | 6.00E−05 | 1281 | 426 | 1704 | 453 | | |
| | | | protein - SEQ ID 12. | | | | | | | | |
| 319, 320 | ADC73058 | 2.00E−89 | Trametes hirsuta cellulolytic enzyme-related | ADC73057 | 4.00E−06 | 1281 | 426 | 1704 | 453 | | |
| | | | protein - SEQ ID 12. | | | | | | | | |
| 321, 322 | ADC73058 | 2.00E−89 | Trametes hirsuta cellulolytic enzyme-related | ADC73057 | 6.00E−05 | 1281 | 426 | 1704 | 453 | | |
| | | | protein - SEQ ID 12. | | | | | | | | |
| 323, 324 | ABM95926 | 3.00E−82 | A. gossypii/S. halstedii fusion construct | AAF61508 | 5.00E−11 | 984 | 327 | 0 | 500 | 53 | |
| | | | containing cellulase DNA. | | | | | | | | |
| 325, 326 | ABM95926 | 2.00E−83 | A. gossypii/S. halstedii fusion construct | AAF61508 | 2.00E−13 | 984 | 327 | 0 | 500 | 53 | |
| | | | containing cellulase DNA. | | | | | | | | |
| 327, 328 | ABM95926 | 3.00E−82 | A. gossypii/S. halstedii fusion construct | AAF61508 | 5.00E−11 | 984 | 327 | 0 | 500 | 53 | |
| | | | containing cellulase DNA. | | | | | | | | |
| 329, 330 | ABM95926 | 1.00E−82 | A. gossypii/S. halstedii fusion construct | AAF61508 | 2.00E−13 | 984 | 327 | 0 | 500 | 53 | |
| | | | containing cellulase DNA. | | | | | | | | |
| 331, 332 | ABM95926 | 1.00E−82 | A. gossypii/S. halstedii fusion construct | AAF61508 | 5.00E−11 | 984 | 327 | 0 | 500 | 53 | |
| | | | containing cellulase DNA. | | | | | | | | |
| 333, 334 | ADC73058 | 6.00E−89 | Trametes hirsuta cellulolytic enzyme-related | ADC73057 | 6.00E−05 | 1281 | 426 | 1704 | 453 | | |
| | | | protein - SEQ ID 12. | | | | | | | | |
| 335, 336 | ADC73058 | 3.00E−89 | Trametes hirsuta cellulolytic enzyme-related | ADC73057 | 6.00E−05 | 1281 | 426 | 1704 | 453 | | |
| | | | protein - SEQ ID 12. | | | | | | | | |
| 337, 338 | AEF20904 | 1.00E−134 | Microbulbifer degradans cellulase system | AEH81863 | 0.021 | 1818 | 605 | 0 | 616 | 42 | |
| | | | protein - SEQ ID 8. | | | | | | | | |
| 339, 340 | AEF20904 | 4.00E−21 | Human cancer associated sequence HP1-10- | ADQ97275 | 1.2 | 1674 | 557 | 0 | 570 | 36 | |
| | | | 003, SEQ ID 12. | | | | | | | | |
| 341, 342 | ABR55182 | 2.00E−46 | M. xanthus protein sequence, seq id 9726. | ACL64337 | 0.003 | 1239 | 412 | 1422 | 473 | 53 | 65 |
| 343, 344 | ABR55182 | 3.00E−46 | M. xanthus protein sequence, seq id 9726. | ACL64337 | 0.003 | 1239 | 412 | 1422 | 473 | 53 | 66 |
| 345, 346 | ABP73029 | 1.00E−136 | Acremonium cellulolyticus cellulase encoding | AAT91640 | 0.017 | 1533 | 510 | 0 | 1128 | 54 | |
| | | | DNA. | | | | | | | | |
| 347, 348 | AAW48419 | 2.00E−57 | Human protein useful for treating neurological | ADR08112 | 3.3 | 1197 | 398 | 2923 | 527 | | |
| | | | disease Seq 1966. | | | | | | | | |
| 349, 350 | AEH81858 | 1.00E−105 | Vibrio harveyi endoglucanase DNA. | AAT94197 | 1.00E−04 | 2460 | 819 | 0 | 1128 | 37 | |
| 351, 352 | AEH81858 | 0 | CAPON-2 amino acid sequence. | ABA97202 | 0.096 | 2118 | 705 | 0 | 791 | 60 | |
| 353, 354 | AAW95602 | 5.00E−65 | Hyperthermophile Methanopyrus kandleri | ADM27081 | 0.96 | 1383 | 460 | 1694968 | 490 | | |
| | | | protein #28. | | | | | | | | |
| 355, 356 | ABJ26888 | 0 | Cellobiohydrolase I activity protein SEQ ID No | ABT23540 | 7.00E−45 | 1359 | 452 | 0 | 452 | 76 | |
| | | | 16. | | | | | | | | |
| 357, 358 | AEJ12745 | 0 | Glucose isomerase SEQ ID NO 20. | AED46539 | 3.00E−87 | 1419 | 472 | 0 | 471 | 89 | |
| 359, 360 | AAB81926 | 0 | Acremonium cellulolyticus xylanase precursor. | AAF85588 | 0 | 1590 | 529 | 0 | 529 | 95 | |
| 361, 362 | AAE16324 | 0 | VSP leader peptide. | ADU48458 | 4.00E−07 | 2220 | 739 | 0 | 739 | 100 | |
| 363, 364 | AEE20076 | 0 | Bacillus licheniformis genomic sequence tag | ABK73355 | 0.065 | 1455 | 484 | 0 | 484 | 100 | |
| | | | (GST) #933. | | | | | | | | |
| 365, 366 | ADR90315 | 1.00E−144 | VSP leader peptide. | ADU48455 | 3.00E−04 | 1401 | 466 | 0 | 477 | 99 | |
| 367, 368 | AEF20904 | 1.00E−119 | M. xanthus protein sequence, seq id 9726. | ACL64233 | 1.2 | 1755 | 584 | 0 | 616 | 42 | |
| 431, 432 | ADJ34940 | 0 | Xylanase from an environmental sample seq id | ADJ34939 | 0 | 1836 | 611 | 1836 | 611 | | |
| | | | 14. | | | | | | | | |
| 433, 434 | ADJ34826 | 0 | Xylanase from an environmental sample seq id | ADJ34825 | 0 | 1893 | 630 | 0 | 592 | 57 | |
| | | | 14. | | | | | | | | |
| 435, 436 | AAB99272 | 3.00E−54 | Human gene NM_022875, SEQ ID NO 12308. | ADE62144 | 2.1 | 2997 | 998 | 3966 | 1321 | 35 | 52 |
| 437, 438 | AED34890 | 1.00E−103 | Endoglucanase encoded by endo3 gene. | AAQ13001 | 1.00E−112 | 1353 | 450 | 2977 | 584 | | |
| 439, 440 | ADJ35128 | 0 | Xylanase from an environmental sample seq id | ADJ35127 | 0 | 2217 | 738 | 2217 | 738 | | |
| | | | 14. | | | | | | | | |
| 441, 442 | ADJ35146 | 0 | Xylanase from an environmental sample seq id | ADJ35145 | 0 | 5043 | 1680 | 5040 | 1680 | | |
| | | | 14. | | | | | | | | |
| 443, 444 | ADJ34914 | 0 | Xylanase from an environmental sample seq id | ADJ34913 | 0 | 2823 | 940 | 0 | 1077 | 99 | |
| | | | 14. | | | | | | | | |
| 445, 446 | AAW34987 | 0 | Vibrio harveyi endoglucanase DNA. | AAT94195 | 0 | 2628 | 875 | 0 | 884 | 45 | |
| 447, 448 | AAE16325 | 0 | TokcelR primer used to isolate Tok7B.1 celE | AAD26525 | 1.00E−104 | 2724 | 907 | 3003 | 1000 | 74 | 75 |
| | | | gene. | | | | | | | | |
| 449, 450 | ADS14829 | 2.00E−28 | Plant full length insert polynucleotide seqid | ADO84476 | 0.048 | 1089 | 362 | 1077 | 358 | 83 | 83 |
| | | | 4980. | | | | | | | | |
| 451, 452 | AEH62812 | 1.00E−131 | Plant full length insert polynucleotide seqid | ADX53508 | 2.00E−08 | 1671 | 556 | 0 | 492 | 51 | |
| | | | 4980. | | | | | | | | |
| 453, 454 | ADJ34940 | 1.00E−11 | DNA encoding a polyphenol oxidase F | AAA63731 | 0.26 | 1503 | 500 | 0 | 2636 | 26 | |
| | | | polypeptide. | | | | | | | | |
| 455, 456 | ADN25642 | 3.00E−11 | Plant polypeptide, SEQ ID 5546. | ADT19227 | 2 | 774 | 257 | 0 | 291 | 100 | |
| 457, 458 | ADS14829 | 2.00E−41 | M. xanthus protein sequence, seq id 9726. | ACL64540 | 7.00E−14 | 1311 | 436 | 0 | 438 | 100 | |
| 459, 460 | AEH62893 | 3.00E−39 | F. rubripes erythrocyte differentiation factor, | ADO05609 | 0.38 | 594 | 197 | 0 | 201 | 71 | |
| | | | Codanin-1. | | | | | | | | |
| 461, 462 | AAW29456 | 3.00E−65 | Maltogenic alpha-amylase signal peptide PCR | AAT29043 | 0.018 | 1572 | 523 | 1929 | 642 | 95 | 95 |
| | | | primer DK16. | | | | | | | | |
| 471, 472 | ADS14829 | 4.00E−27 | Human protein sequence hCP39072. | ACN44350 | 0.75 | 1095 | 364 | 0 | 364 | 100 | |
| 489, 490 | AKT18586 | 1.00E−144 | Bacterial polypeptide #23667. | ADS48454 | 6.00E−14 | 1146 | 381 | 0 | 382 | 69 | |
| 491, 492 | AAW46814 | 0 | Endo beta-1,4-gluconase peptide 3. | AAV16436 | 0 | 999 | 332 | 999 | 332 | 99 | 97 |
| 493, 494 | AAW46814 | 0 | Endo beta-1,4-gluconase peptide 3. | AAV16436 | 0 | 999 | 332 | 999 | 332 | 99 | 97 |
| 495, 496 | AAW15563 | 1.00E−112 | Talaromyces emersonii beta-glucanase CEC | AAD20928 | 2.00E−07 | 999 | 332 | 0 | 335 | | |
| | | | protein. | | | | | | | | |
| 497, 498 | ADN20544 | 1.00E−154 | Endoglucanase (60 kDa Family 5 cellulase) | AAT29035 | 6.00E−45 | 1200 | 399 | 0 | 382 | 65 | |
| | | | cDNA sequence. | | | | | | | | |
| 499, 500 | AKT18586 | 1.00E−145 | Bacterial polypeptide #23667. | ADS48454 | 6.00E−11 | 1149 | 382 | 0 | 382 | 84 | |
| 501, 502 | ADN20544 | 1.00E−155 | P. brasilianum cel5c endoglucanase reverse | AKT18585 | 9.00E−35 | 1200 | 399 | 0 | 390 | 66 | |
| | | | PCR primer, SEQ ID NO: 15. | | | | | | | | |
| 503, 504 | ADC58031 | 1.00E−114 | Talaromyces emersonii beta-glucanase CEC | AAD20928 | 1.00E−08 | 993 | 330 | 0 | 337 | 64 | |
| | | | protein. | | | | | | | | |
| 505, 506 | AEB00295 | 1.00E−178 | P. brasilianum cel5c endoglucanase reverse | AKT18585 | 6.00E−79 | 1230 | 409 | 0 | 384 | 72 | |
| | | | PCR primer, SEQ ID NO: 15. | | | | | | | | |
| 507, 508 | AAE12786 | 1.00E−124 | Talaromyces emersonii beta-glucanase CEC | AAD20928 | 4.00E−15 | 1023 | 340 | 0 | 1272 | 67 | |
| | | | protein. | | | | | | | | |
| 509, 510 | AEB00295 | 0 | P. brasilianum cel5c endoglucanase reverse | AKT18585 | 1.00E−120 | 1224 | 407 | 0 | 388 | 75 | |
| | | | PCR primer, SEQ ID NO: 15. | | | | | | | | |
| 511, 512 | AKT18592 | 1.00E−163 | Bacterial polypeptide #23667. | ADS60941 | 7.00E−17 | 1233 | 410 | 0 | 410 | 95 | |
| 513, 514 | AKT18586 | 1.00E−145 | Bacterial polypeptide #23667. | ADS60941 | 4.00E−12 | 1149 | 382 | 0 | 382 | 84 | |
| 515, 516 | AAW56742 | 1.00E−85 | Human prostate expressed polynucleotide SEQ | ABQ88968 | 1 | 1368 | 455 | 0 | 814 | 100 | |
| | | | ID NO 803. | | | | | | | | |
| 517, 518 | AKT18592 | 1.00E−163 | Bacterial polypeptide #23667. | ADS60941 | 7.00E−17 | 1233 | 410 | 0 | 410 | 95 | |
| 519, 520 | AKT18592 | 0 | P. brasilianum cel5c endoglucanase reverse | AKT18591 | 1.00E−109 | 1260 | 419 | 1488 | 421 | | |
| | | | PCR primer, SEQ ID NO: 15. | | | | | | | | |
| 521, 522 | ABB80166 | 0 | Glucose isomerase SEQ ID NO 20. | AED46552 | 6.00E−61 | 1413 | 470 | 0 | 459 | 86 | |
| 523, 524 | ABJ26885 | 0 | Cellobiohydrolase I activity protein SEQ ID No | ABT23507 | 7.00E−70 | 1569 | 522 | 0 | 523 | | |
| | | | 16. | | | | | | | | |
| 525, 526 | AEH81867 | 0 | H. salinarum nucleoside diphosphate kinase, | AEK17721 | 0.12 | 2481 | 826 | 0 | 856 | 58 | |
| | | | SEQ ID NO: 4. | | | | | | | | |
| 527, 528 | ADC51490 | 1.00E−180 | Cryptosporidium hominis protein SEQ ID NO: 2. | AEH40716 | 1.3 | 1725 | 574 | 1431 | 571 | | |
| 529, 530 | AAE23633 | 0 | Thermoanaerobacter cellulolyticus thermostable | AAV23285 | 7.00E−05 | 1347 | 448 | 0 | 448 | 100 | |
| | | | beta-glucosidase. | | | | | | | | |
| 531, 532 | ADS30418 | 1.00E−152 | Tib10 beta-gly, SEQ ID 10. | ADQ75574 | 7.00E−05 | 1362 | 453 | 0 | 463 | | |
| 533, 534 | ADR51303 | 1.00E−117 | Human Klotho cDNA, SEQ ID NO: 5. | AAH23959 | 0.066 | 1338 | 445 | 0 | 456 | | |
| 535, 536 | ADR51299 | 0 | Anti-biofilm polypeptide #100. | ADR51298 | 0 | 1263 | 420 | 1272 | 423 | 81 | 72 |
| 537, 538 | ADR51283 | 0 | Thermococcus 9N2-31B/G glycosidase gene | AAV36911 | 0 | 2166 | 721 | 2166 | 721 | 99 | 99 |
| | | | coding region. | | | | | | | | |
| 539, 540 | ADR51303 | 0 | Anti-biofilm polypeptide #100. | ADR51302 | 0 | 1389 | 462 | 0 | 459 | | |
| 541, 542 | ADR51303 | 1.00E−110 | Bacterial polypeptide #23667. | ADS56264 | 3.00E−04 | 1350 | 449 | 0 | 454 | | |
| 543, 544 | ADN26272 | 1.00E−125 | Bacterial polypeptide #23667. | ADS56139 | 6.00E−05 | 1188 | 395 | 0 | 411 | | |
| 545, 546 | ADN01220 | 1.00E−123 | T. bispora NRRL 15568 beta-glucosidase. | ADN01219 | 7.00E−05 | 1386 | 461 | 0 | 467 | | |
| 547, 548 | ADS30418 | 1.00E−180 | Bacterial polypeptide #23667. | ADS56264 | 8.00E−11 | 1377 | 458 | 0 | 463 | | |
| 549, 550 | ADR51303 | 1.00E−141 | Streptococcus sp. H021 Orf2, oxidoreductase. | AAD47222 | 1.1 | 1404 | 467 | 0 | 471 | 56 | |
| 551, 552 | ADS21519 | 1.00E−119 | Anti-biofilm polypeptide #100. | ADR51312 | 2.00E−08 | 1230 | 409 | 0 | 439 | 53 | |
| 553, 554 | ADZ83372 | 5.00E−78 | Anti-biofilm polypeptide #100. | ADR51312 | 0.25 | 1284 | 427 | 1314 | 423 | | |
| 555, 556 | AAR88093 | 0 | Thermostable beta-galactosidase conserved | AAT09293 | 0 | 1419 | 472 | 1419 | 472 | 100 | 100 |
| | | | sequence (Box 10). | | | | | | | | |
| 557, 558 | AAR25384 | 0 | PCR primer for cDNA encoding a beta- | AAA63953 | 3.00E−05 | 2160 | 719 | 0 | 696 | | |
| | | | glucosidase polypeptide. | | | | | | | | |
| 559, 560 | ADR51229 | 0 | Anti-biofilm polypeptide #100. | ADR51228 | 0 | 1431 | 476 | 0 | 467 | | |
| 561, 562 | ADN01220 | 1.00E−107 | Bacterial polypeptide #23667. | ADT43152 | 4.00E−06 | 1350 | 449 | 0 | 440 | 65 | |
| 563, 564 | ADR51303 | 0 | Anti-biofilm polypeptide #100. | ADR51302 | 1.00E−131 | 1389 | 462 | 0 | 459 | | |
| 565, 566 | ADS30418 | 1.00E−143 | Human myocardial infarction-associated gene | ADQ38981 | 2.00E−05 | 1347 | 448 | 0 | 448 | 57 | |
| | | | derived protein, SEQ ID 835. | | | | | | | | |
| 567, 568 | ABU24282 | 5.00E−34 | S. epidermidis genomic polynucleotide | AAH54621 | 0.08 | 1620 | 539 | 0 | 520 | 23 | |
| | | | sequence SEQ ID NO: 4137. | | | | | | | | |
| 569, 570 | ADN01220 | 1.00E−107 | Protein encoded by Prokaryotic essential gene | ACA25213 | 0.017 | 1350 | 449 | 0 | 440 | 67 | |
| | | | #30232. | | | | | | | | |
| 571, 572 | ADR51303 | 1.00E−140 | Bacterial polypeptide #23667. | ADS56139 | 0.27 | 1404 | 467 | 0 | 471 | 56 | |
| 573, 574 | AEX28563 | 1.00E−118 | Arabidopsis herbicide target gene 4036 cDNA. | AAA50081 | 1.9 | 2457 | 818 | 0 | 831 | 41 | |
| 575, 576 | AAE23633 | 1.00E−133 | Plant full length insert polynucleotide seqid | ADX11847 | 0.001 | 1362 | 453 | 0 | 446 | 56 | |
| | | | 4980. | | | | | | | | |
| 577, 578 | ABU48326 | 1.00E−111 | Arabidopsis thaliana polynucleotide SEQ ID NO | ABQ65793 | 0.44 | 2229 | 742 | 0 | 766 | 56 | |
| | | | 197. | | | | | | | | |
| 579, 580 | ADN01220 | 1.00E−156 | Bacterial polypeptide #23667. | ADS56264 | 6.00E−30 | 1434 | 477 | 0 | 478 | 82 | |
| 581, 582 | ADH88405 | 1.00E−178 | Listeria innocua DNA sequence #303. | ABQ70760 | 0.007 | 2268 | 755 | 0 | 743 | | |
| 583, 584 | AEH81871 | 0 | Vibrio harveyi endoglucanase DNA. | AAT94214 | 2.00E−06 | 2577 | 858 | 0 | 888 | 64 | |
| 585, 586 | AEX29253 | 1.00E−112 | Vibrio harveyi endoglucanase DNA. | AAT94214 | 0.007 | 2331 | 776 | 0 | 766 | 47 | |
| 587, 588 | AAR97199 | 0 | Chimaeric thermostable beta-glucosidase. | AAT32999 | 4.00E−26 | 2238 | 745 | 0 | 748 | 59 | |
| 589, 590 | ADR51313 | 0 | Anti-biofilm polypeptide #100. | ADR51312 | 0 | 1314 | 437 | 1314 | 437 | | |
| 591, 592 | AAE23633 | 1.00E−109 | P. chrysosporium CKG4 lignin peroxidase | ABK86730 | 3.00E−10 | 1455 | 484 | 0 | 451 | 42 | |
| | | | (ligninase)(LIP). | | | | | | | | |
| 593, 594 | ADC51488 | 8.00E−79 | DNA sequence of Myxococcus fulvus | AAA75307 | 8.00E−18 | 2007 | 668 | 0 | 671 | 66 | |
| | | | pyrrolnitrin gene region. | | | | | | | | |
| 595, 596 | AEX29253 | 1.00E−155 | Protein encoded by Prokaryotic essential gene | ACA45681 | 0.007 | 2244 | 747 | 0 | 763 | | |
| | | | #30232. | | | | | | | | |
| 597, 598 | AEJ12745 | 0 | Cellobiohydrolase CBH II protein. | AAN50359 | 0 | 1416 | 471 | 0 | 471 | 100 | |
| 599, 600 | AAW57419 | 0 | Cellobiohydrolase I (CBH1) mutant S92T. | ADK81787 | 1.00E−141 | 1518 | 505 | 0 | 505 | 100 | |
| 601, 602 | ABB80166 | 0 | Glucose isomerase SEQ ID NO 20. | AED46552 | 6.00E−61 | 1413 | 470 | 0 | 459 | 86 | |
| 603, 604 | ABJ26885 | 0 | Cellobiohydrolase I activity protein SEQ ID No | ABT23507 | 7.00E−70 | 1569 | 522 | 0 | 523 | | |
| | | | 16. | | | | | | | | |
| 605, 606 | ABJ26902 | 0 | Cellobiohydrolase I activity protein SEQ ID No | ABT23540 | 1.00E−90 | 1638 | 545 | 0 | 537 | 78 | |
| | | | 16. | | | | | | | | |
| 607, 608 | ABJ26901 | 0 | Cellobiohydrolase I activity protein SEQ ID No | ABT23510 | 2.00E−54 | 1338 | 445 | 0 | 448 | 71 | |
| | | | 16. | | | | | | | | |
| 609, 610 | AAW95029 | 0 | Cellobiohydrolase I activity protein SEQ ID No | ABT23506 | 4.00E−28 | 1365 | 454 | 0 | 455 | 93 | |
| | | | 16. | | | | | | | | |
| 611, 612 | ADW12302 | 8.00E−45 | Endoplasmic reticulum retaining peptide. | AAC84644 | 0.056 | 1158 | 385 | 0 | 400 | 53 | |
| 613, 614 | AED46513 | 1.00E−103 | Plasmid pNOV4031 amylase fusion amino acid | ACC44578 | 0.002 | 1995 | 664 | 960 | 319 | 27 | 28 |
| | | | sequence SEQ ID NO: 16. | | | | | | | | |
| 615, 616 | AAR15237 | 0 | Linking B region #8 derived from a | AAQ14838 | 0 | 1545 | 514 | 0 | 514 | 97 | |
| | | | (hemi)cellulose-degrading enzyme. | | | | | | | | |
| 617, 618 | ABJ26902 | 0 | Cellobiohydrolase I activity protein SEQ ID No | ABT23540 | 2.00E−20 | 1581 | 526 | 0 | 521 | 67 | |
| | | | 16. | | | | | | | | |
| 619, 620 | ABB80166 | 0 | A. fumigatus AfGOX3. | ABQ80324 | 3.00E−93 | 1395 | 464 | 0 | 454 | 77 | |
| 621, 622 | AAW35004 | 1.00E−157 | Protein encoded by Prokaryotic essential gene | ACA45681 | 0.008 | 2412 | 803 | 2421 | 806 | 67 | 71 |
| | | | #30232. | | | | | | | | |
| 623, 624 | AEH47476 | 0 | Environmental isolate hydrolase, SEQ ID | AEH47475 | 0 | 1293 | 430 | 1293 | 430 | | |
| | | | NO: 44. | | | | | | | | |
| 625, 626 | AAW35004 | 1.00E−173 | Protein encoded by Prokaryotic essential gene | ACA45681 | 0.008 | 2358 | 785 | 0 | 765 | 53 | |
| | | | #30232. | | | | | | | | |
| 627, 628 | AEC74753 | 5.00E−85 | Myceliophthora thermophila xylanase cDNA. | AAT74074 | 2.00E−13 | 1002 | 333 | 0 | 384 | 65 | |
| 629, 630 | AEL86665 | 4.00E−97 | Monterey pine calnexin protein, SEQ ID: 231. | AGI25306 | 8.00E−08 | 1524 | 507 | 1281 | 426 | 55 | 56 |
| 631, 632 | AAY52699 | 1.00E−154 | Aspergillus fumigatus essential gene protein | ADR84318 | 0.44 | 2232 | 743 | 0 | 755 | | |
| | | | #385. | | | | | | | | |
| 633, 634 | AAR25384 | 0 | PCR primer for cDNA encoding a beta- | AAA63953 | 3.00E−05 | 2160 | 719 | 0 | 696 | | |
| | | | glucosidase polypeptide. | | | | | | | | |
| 635, 636 | AEH81913 | 2.00E−70 | Angiotensin gene methylation analysing | AAD28365 | 2.9 | 981 | 326 | 987 | 328 | 92 | 93 |
| | | | oligonucleotide #2. | | | | | | | | |
| 637, 638 | ADZ51810 | 1.00E−179 | Plant cDNA #31. | ADJ40527 | 0.34 | 1734 | 577 | 0 | 559 | | |
| 639, 640 | AEH47790 | 0 | Environmental isolate hydrolase, SEQ ID | AEH47789 | 0 | 1581 | 526 | 1581 | 526 | | |
| | | | NO: 44. | | | | | | | | |
| 641, 642 | AEH47208 | 0 | Environmental isolate hydrolase, SEQ ID | AEH47207 | 0 | 2040 | 679 | 2040 | 679 | | |
| | | | NO: 44. | | | | | | | | |
| 643, 644 | AEH47654 | 0 | Environmental isolate hydrolase, SEQ ID | AEH47653 | 0 | 1623 | 540 | 1623 | 540 | | |
| | | | NO: 44. | | | | | | | | |
| 645, 646 | ADS30418 | 1.00E−146 | Mouse protein tyrosine phosphatase | AAT85389 | 4.1 | 1362 | 453 | 0 | 463 | | |
| | | | PTPepsilon. | | | | | | | | |
| 647, 648 | AEH81915 | 0 | Bacterial polypeptide #23667. | ADT46252 | 0.007 | 2163 | 720 | 0 | 778 | 62 | |
| 649, 650 | AEH47274 | 1.00E−149 | Environmental isolate hydrolase, SEQ ID | AEH47273 | 0 | 759 | 252 | 759 | 252 | | |
| | | | NO: 44. | | | | | | | | |
| 651, 652 | AEG60866 | 1.00E−127 | N-terminal peptide of the alpha-glucuronidase | AAV05187 | 0.13 | 2508 | 835 | 0 | 836 | | |
| | | | protein. | | | | | | | | |
| 653, 654 | AEH81915 | 0 | Microbulbifer degradans cellulase system | AEH81916 | 0.002 | 2046 | 681 | 0 | 711 | | |
| | | | protein - SEQ ID 8. | | | | | | | | |
| 655, 656 | AEH81913 | 1.00E−117 | B. amyloliquefaciens bacillomycin A protein Seq | ADW21121 | 0.012 | 966 | 321 | 0 | 323 | | |
| | | | 3. | | | | | | | | |
| 657, 658 | ADJ35150 | 0 | Xylanase from an environmental sample seq id | ADJ35149 | 0 | 3246 | 1081 | 3246 | 1081 | | |
| | | | 14. | | | | | | | | |
| 659, 660 | ADN97699 | 4.00E−50 | Bacterial polypeptide #23667. | ADS58668 | 0.013 | 1026 | 341 | 0 | 346 | 64 | |
| 661, 662 | ADJ34838 | 1.00E−112 | S ambofaciens spiramycin biosynthetic enzyme | ADN97710 | 2.00E−34 | 831 | 276 | 978 | 325 | 92 | 95 |
| | | | encoded by ORF10*. | | | | | | | | |
| 663, 664 | AAB29041 | 1.00E−180 | Partial Chrysoporium GPD1. | AAI72046 | 6.00E−88 | 1116 | 371 | 3028 | 384 | | |
| 665, 666 | AEM25422 | 1.00E−124 | Melanocarpus albomyces 20 K cellulase | AEL87188 | 2.00E−11 | 1182 | 393 | 0 | 423 | 67 | |
| | | | protein. | | | | | | | | |
| 667, 668 | AEF10657 | 0 | F. venenatum alpha-glucosidase DNA | AEF93568 | 1.00E−14 | 2541 | 846 | 0 | 884 | | |
| | | | amplifying primer, SEQ ID 7. | | | | | | | | |
| 669, 670 | AEX25100 | 1.00E−145 | Enterobacter cloacae protein amino acid | AEH55030 | 0.12 | 2307 | 768 | 0 | 765 | 68 | |
| | | | sequence - SEQ ID 5666. | | | | | | | | |
| 671, 672 | AEG60856 | 1.00E−147 | Enterobacter cloacae protein amino acid | AEH55475 | 8.00E−05 | 1572 | 523 | 0 | 523 | | |
| | | | sequence - SEQ ID 5666. | | | | | | | | |
| 673, 674 | AAW53957 | 0 | Streptomyces lividans alpha-L- | AEH35455 | 3.00E−10 | 1506 | 501 | 0 | 502 | 62 | |
| | | | arabinofuranosidase, abfA reporter gene. | 0 | 489 | | | | | | |
| 675, 676 | ADS28234 | 1.00E−138 | Bacterial polypeptide #23667. | ADT43018 | 3.00E−10 | 1482 | 493 | | | | |
| 677, 678 | ADS27294 | 1.00E−171 | Microbulbifer degradans cellulase system | AEH81970 | 2.00E−08 | 1566 | 521 | 0 | 521 | 57 | |
| | | | protein - SEQ ID 8. | | | | | | | | |
| 679, 680 | ADJ34876 | 1.00E−59 | S roseosporus daptomycin biosynthesis gene | ADJ72366 | 0.19 | 1020 | 339 | 0 | 336 | 36 | |
| | | | cluster protein #20. | | | | | | | | |
| 681, 682 | AGI25538 | 1.00E−108 | Plant full length insert polynucleotide seqid | ADX50876 | 7.00E−06 | 2094 | 697 | 0 | 709 | | |
| | | | 4980. | | | | | | | | |
| 683, 684 | AAB10913 | 1.00E−110 | Streptomyces sp. arabinofuranosidase DNA | AAA71999 | 4.00E−04 | 1983 | 660 | 0 | 660 | 60 | |
| | | | SEQ ID NO: 2. | | | | | | | | |
| 685, 686 | ADS28234 | 1.00E−172 | Xylanase from an environmental sample seq id | ADJ34919 | 2.00E−16 | 2637 | 878 | 0 | 521 | 33 | |
| | | | 14. | | | | | | | | |
| 687, 688 | ADJ34868 | 4.00E−58 | Chlorella sorokiniana EST SEQ ID NO 9395. | AJP88135 | 2.5 | 843 | 280 | 0 | 286 | 58 | |
| 689, 690 | AAY01076 | 1.00E−102 | Human OPG (osteoprotegerin) K108N protein | ABS54850 | 1.00E−113 | 1350 | 449 | 0 | 394 | 65 | |
| | | | mutant. | | | | | | | | |
| 691, 692 | ADN25476 | 0 | Bacterial polypeptide #23667. | ADS56142 | 0 | 2643 | 880 | 0 | 880 | 100 | |
| 693, 694 | ADR51303 | 1.00E−141 | Streptococcus sp. H021 Orf2, oxidoreductase. | AAD47222 | 1.1 | 1404 | 467 | 0 | 471 | 56 | |
| 695, 696 | AEH81913 | 1.00E−125 | Microbulbifer degradans cellulase system | AEH81914 | 8.00E−04 | 975 | 324 | 0 | 324 | | |
| | | | protein - SEQ ID 8. | | | | | | | | |
| 697, 698 | AEH81913 | 1.00E−127 | LRTM4 protein #SEQ ID 2. | ACC83217 | 0.18 | 972 | 323 | 0 | 324 | | |
| 699, 700 | ADR51269 | 0 | Anti-biofilm polypeptide #100. | ADR51268 | 0 | 2163 | 720 | 0 | 705 | 58 | |
| 718, 719 | ADJ34800 | 0 | Xylanase from an environmental sample seq id | ADJ34799 | 0 | 1110 | 369 | 1110 | 369 | | |
| | | | 14. | | | | | | | | |
| 720, 721 | ADS27945 | 0.39 | Human immune system associated gene SEQ | ABL32292 | 0.25 | 1299 | 432 | 0 | 444 | | |
| | | | ID. NO: 59. | | | | | | | | |

[0178] The initial source of selected exemplary polypeptides and nucleic acids of this invention are:

| SEQ ID NO: | Source |
|---|---|
| 473 | Glycine max glycinin GY1 signal sequence |
| 474 | ER retention sequence |
| 475 | sporamin vacuolar targeting sequence |
| 476 | transit peptide from ferredoxin-NADP+ reductase (FNR) |
| | of Cyanophora paradoxa |
| 477 | protein storage vacuole (PSV) sequence from |
| | b-conglycinin |
| 478 | gamma zein 27 kD signal sequence |
| 479 | vacuole sequence domain (VSD) from barley polyamine |
| | oxidase |
| 480 | dicot optimized SEQ ID NO: 359 |
| 481 | dicot optimized SEQ ID NO: 357 |
| 482 | dicot optimized SEQ ID NO: 167 |
| 483 | monocot optimized SEQ ID NO: 359 |
| 484 | monocot optimized SEQ ID NO: 357 |
| 485 | monocot optimized SEQ ID NO: 167 |
| 486 | monocot optimized SEQ ID NO: 33 |
| 487 | dicot optimized SEQ ID NO: 33 |
| 488 | Cestrum yellow leaf curl virus promoter plus leader |
| 701 | from SEQ ID NO: 360 (D2150-3WO) |
| 702 | from SEQ ID NO: 371 (D2150-3WO) |
| 703 | from SEQ ID NO: 606 (D2150-3WO) |
| 704 | Thermobifida fusca GH6 (Genbank YP_289135) |
| 705 | Saccharophagus degradans (Genbank YP_527744) |
| 706 | Xylella fastidiosa (Genbank NP_780034.1) |
| 1, 2 | Unknown |
| 101, 102 | Unknown |
| 103, 104 | Unknown |
| 105, 106 | Unknown |
| 107, 108 | Unknown |
| 109, 110 | Unknown |
| 11, 12 | Teredinibacter |
| 111, 112 | Unknown |
| 113, 114 | Unknown |
| 115, 116 | Unknown |
| 117, 118 | Unknown |
| 119, 120 | Unknown |
| 121, 122 | Unknown |
| 123, 124 | Unknown |
| 125, 126 | Unknown |
| 127, 128 | Unknown |
| 129, 130 | Unknown |
| 13, 14 | Unknown |
| 131, 132 | Unknown |
| 133, 134 | Unknown |
| 135, 136 | Unknown |
| 137, 138 | Unknown |
| 139, 140 | Unknown |
| 141, 142 | Unknown |
| 143, 144 | Unknown |
| 145, 146 | Unknown |
| 147, 148 | Unknown |
| 149, 150 | Unknown |
| 15, 16 | Bacteria |
| 151, 152 | Unknown |
| 153, 154 | Unknown |
| 155, 156 | Unknown |
| 157, 158 | Unknown |
| 159, 160 | Unknown |
| 161, 162 | Unknown |
| 163, 164 | Unknown |
| 165, 166 | Unknown |
| 167, 168 | Unknown |
| 169, 170 | Unknown |
| 17, 18 | Bacteria |
| 171, 172 | Unknown |
| 173, 174 | Unknown |
| 175, 176 | Unknown |
| 177, 178 | Unknown |
| 179, 180 | Unknown |
| 181, 182 | Unknown |
| 183, 184 | Unknown |
| 185, 186 | Unknown |
| 187, 188 | Unknown |
| 189, 190 | Unknown |
| 19, 20 | Unknown |
| 191, 192 | Unknown |
| 193, 194 | Unknown |
| 195, 196 | Unknown |
| 197, 198 | Unknown |
| 199, 200 | Unknown |
| 201, 202 | Unknown |
| 203, 204 | Unknown |
| 205, 206 | Unknown |
| 207, 208 | Unknown |
| 209, 210 | Unknown |
| 21, 22 | Unknown |
| 211, 212 | Unknown |
| 213, 214 | Unknown |
| 215, 216 | Unknown |
| 217, 218 | Unknown |
| 219, 220 | Unknown |
| 221, 222 | Unknown |
| 223, 224 | Unknown |
| 225, 226 | Unknown |
| 227, 228 | Unknown |
| 229, 230 | Unknown |
| 23, 24 | Unknown |
| 231, 232 | Unknown |
| 233, 234 | Unknown |
| 235, 236 | Unknown |
| 237, 238 | Unknown |
| 239, 240 | Unknown |
| 241, 242 | Unknown |
| 243, 244 | Unknown |
| 245, 246 | Unknown |
| 247, 248 | Unknown |
| 249, 250 | Unknown |
| 25, 26 | Unknown |
| 251, 252 | Unknown |
| 253, 254 | Unknown |
| 255, 256 | Unknown |
| 257, 258 | Unknown |
| 259, 260 | Unknown |
| 261, 262 | Unknown |
| 263, 264 | Unknown |
| 265, 266 | Unknown |
| 267, 268 | Fungus |
| 269, 270 | Unknown |
| 27, 28 | Agaricus bisporus ATCC 62489 |
| 271, 272 | Unknown |
| 273, 274 | Unknown |
| 275, 276 | Unknown |
| 277, 278 | Unknown |
| 279, 280 | Unknown |
| 281, 282 | Fungus |
| 283, 284 | Unknown |
| 285, 286 | Unknown |
| 287, 288 | Unknown |
| 289, 290 | Unknown |
| 29, 30 | Agaricus bisporus ATCC 62489 |
| 291, 292 | Unknown |
| 293, 294 | Unknown |
| 295, 296 | Unknown |
| 297, 298 | Unknown |
| 299, 300 | Unknown |
| 3, 4 | Unknown |
| 301, 302 | Unknown |
| 303, 304 | Unknown |
| 305, 306 | Unknown |
| 307, 308 | Unknown |
| 309, 310 | Unknown |
| 31, 32 | Unknown |
| 311, 312 | Unknown |
| 313, 314 | Unknown |
| 315, 316 | Unknown |
| 317, 318 | Unknown |
| 319, 320 | Unknown |
| 321, 322 | Unknown |
| 323, 324 | Unknown |
| 325, 326 | Unknown |
| 327, 328 | Unknown |
| 329, 330 | Unknown |
| 33, 34 | Fungus |
| 331, 332 | Unknown |
| 333, 334 | Unknown |
| 335, 336 | Unknown |
| 337, 338 | Unknown |
| 339, 340 | Unknown |
| 341, 342 | Unknown |
| 343, 344 | Unknown |
| 345, 346 | Unknown |
| 347, 348 | Unknown |
| 349, 350 | Unknown |
| 35, 36 | Cochliobolus heterostrophus ATCC 48331 |
| 351, 352 | Unknown |
| 353, 354 | Unknown |
| 355, 356 | Unknown |
| 357, 358 | Fungus |
| 359, 360 | Fungus |
| 361, 362 | Clostridium thermocellum ATCC 27405 |
| 363, 364 | Clostridium thermocellum ATCC 27405 |
| 365, 366 | Clostridium thermocellum ATCC 27405 |
| 367, 368 | Unknown |
| 369-371 | Fungus |
| 37, 38 | Clostridium thermocellum ATCC 27405 |
| 372-374 | Botrytis cinerea ATCC 204446 |
| 375-377 | Fusarium verticillioides GZ3639 |
| 378-380 | Fungus |
| 381-383 | Fungus |
| 384-386 | Fungus |
| 387-389 | Fungus |
| 39, 40 | Unknown |
| 390-392 | Fungus |
| 393-395 | Fungus |
| 396-398 | Fungus |
| 399-401 | Fungus |
| 402-404 | Fungus |
| 405-407 | Fungus |
| 408-410 | Fungus |
| 41, 42 | Unknown |
| 411-413 | Fungus |
| 414-416 | Fungus |
| 417-419 | Fungus |
| 420-422 | Agaricus bisporus ATCC 62489 |
| 423, 424 | Unknown |
| 425, 426 | Unknown |
| 427, 428 | Unknown |
| 429, 430 | Unknown |
| 43, 44 | Unknown |
| 431, 432 | Unknown |
| 433, 434 | Unknown |
| 435, 436 | Unknown |
| 437, 438 | Unknown |
| 439, 440 | Unknown |
| 441, 442 | Unknown |
| 443, 444 | Bacteria |
| 445, 446 | Unknown |
| 447, 448 | Unknown |
| 449, 450 | Unknown |
| 45, 46 | Unknown |
| 451, 452 | Unknown |
| 453, 454 | Unknown |
| 455, 456 | Thermobifida fusca |
| 457, 458 | Thermobifida fusca |
| 459, 460 | Bacteria |
| 461, 462 | Bacteria |
| 463, 464 | Unknown |
| 465, 466 | Unknown |
| 467, 468 | Unknown |
| 469, 470 | Unknown |
| 47, 48 | Unknown |
| 471, 472 | Streptomyces coelicolor |
| 489, 490 | Fungus |
| 49, 50 | Unknown |
| 491, 492 | Fungus |
| 493, 494, 707 | Fungus |
| 495, 496, 710 | Fungus |
| 497, 498, 711 | Fungus |
| 499, 500, 712 | Fungus |
| 5, 6 | Unknown |
| 501, 502, 713 | Fungus |
| 503, 504, 714 | Fungus |
| 505, 506, 715 | Fungus |
| 507, 508, 716 | Fungus |
| 509, 510, 717 | Fungus |
| 51, 52 | Unknown |
| 511, 512, 708 | Fungus |
| 513, 514, 709 | Fungus |
| 515, 516 | Clostridium thermocellum |
| 517, 518 | Fungus |
| 519, 520 | Fungus |
| 521, 522 | Fungus |
| 523, 524 | Fungus |
| 525, 526 | Unknown |
| 527, 528 | Unknown |
| 529, 530 | Clostridium thermocellum |
| 53, 54 | Unknown |
| 531, 532 | Unknown |
| 533, 534 | Unknown |
| 535, 536 | Thermococcus alcaliphilus |
| 537, 538 | Thermotoga maritima MSB8 |
| 539, 540 | Unknown |
| 541, 542 | Unknown |
| 543, 544 | Unknown |
| 545, 546 | Unknown |
| 547, 548 | Unknown |
| 549, 550 | Unknown |
| 55, 56 | Unknown |
| 551, 552 | Unknown |
| 553, 554 | Unknown |
| 555, 556 | Pyrococcus furiosus VC1 |
| 557, 558 | Cochliobolus heterostrophus ATCC 48331 |
| 559, 560 | Unknown |
| 561, 562 | Unknown |
| 563, 564 | Unknown |
| 565, 566 | Unknown |
| 567, 568 | Unknown |
| 569, 570 | |
| 57, 58 | Unknown |
| 571, 572 | Unknown |
| 573, 574 | Unknown |
| 575, 576 | Bacteria |
| 577, 578 | Unknown |
| 579, 580 | |
| 581, 582 | Unknown |
| 583, 584 | Unknown |
| 585, 586 | Unknown |
| 587, 588 | Unknown |
| 589, 590 | Unknown |
| 59, 60 | Unknown |
| 591, 592 | Unknown |
| 593, 594 | Unknown |
| 595, 596 | Unknown |
| 597, 598 | Trichoderma reesei ATCC 13631 |
| 599, 600 | Trichoderma reesei ATCC 13631 |
| 601, 602 | Fungus |
| 603, 604 | Fungus |
| 605, 606 | Fungus |
| 607, 608 | Fungus |
| 609, 610 | Fungus |
| 61, 62 | Unknown |
| 611, 612 | Unknown |
| 613, 614 | Unknown |
| 615, 616 | Fungus |
| 617, 618 | Fungus |
| 619, 620 | Fungus |
| 621, 622 | Unknown |
| 623, 624 | Unknown |
| 625, 626 | Unknown |
| 627, 628 | Cochliobolus heterostrophus ATCC 48331 |
| 629, 630 | Cochliobolus heterostrophus ATCC 48331 |
| 63, 64 | Unknown |
| 631, 632 | Cochliobolus heterostrophus ATCC 48331 |
| 633, 634 | Cochliobolus heterostrophus ATCC 48331 |
| 635, 636 | Cochliobolus heterostrophus ATCC 48331 |
| 637, 638 | Cochliobolus heterostrophus ATCC 48331 |
| 639, 640 | Unknown |
| 641, 642 | Unknown |
| 643, 644 | Unknown |
| 645, 646 | Unknown |
| 647, 648 | Unknown |
| 649, 650 | Cochliobolus heterostrophus ATCC 48331 |
| 65, 66 | Unknown |
| 651, 652 | Cochliobolus heterostrophus ATCC 48331 |
| 653, 654 | Unknown |
| 655, 656 | Unknown |
| 657, 658 | Unknown |
| 659, 660 | Cochliobolus heterostrophus ATCC 48331 |
| 661, 662 | Cochliobolus heterostrophus ATCC 48331 |
| 663, 664 | Cochliobolus heterostrophus ATCC 48331 |
| 665, 666 | Cochliobolus heterostrophus ATCC 48331 |
| 667, 668 | Cochliobolus heterostrophus ATCC 48331 |
| 669, 670 | Unknown |
| 67, 68 | Unknown |
| 671, 672 | Unknown |
| 673, 674 | Unknown |
| 675, 676 | Unknown |
| 677, 678 | Unknown |
| 679, 680 | Unknown |
| 681, 682 | Unknown |
| 683, 684 | Unknown |
| 685, 686 | Unknown |
| 687, 688 | Cochliobolus heterostrophus ATCC 48331 |
| 689, 690 | Cochliobolus heterostrophus ATCC 48331 |
| 69, 70 | Unknown |
| 691, 692 | Thermobifida fusca YX BAA-629 |
| 693, 694 | Unknown |
| 695, 696 | Unknown |
| 697, 698 | Unknown |
| 699, 700 | Unknown |
| 7, 8 | Unknown |
| 71, 72 | Unknown |
| 718, 719 | Unknown |
| 720, 721 | Cochliobolus heterostrophus ATCC 48331 |
| 73, 74 | Unknown |
| 75, 76 | Unknown |
| 77, 78 | Unknown |
| 79, 80 | Unknown |
| 81, 82 | Unknown |
| 83, 84 | Unknown |
| 85, 86 | Unknown |
| 87, 88 | Unknown |
| 89, 90 | Clostridium thermocellum ATCC 27405 |
| 9, 10 | Unknown |
| 91, 92 | Unknown |
| 93, 94 | Unknown |
| 95, 96 | Unknown |
| 97, 98 | Unknown |
| 99, 100 | Unknown |

[0179] The invention also includes methods for discovering, identifying or isolated new lignocellulosic enzymes, including cellulase, endoglucanase, cellobiohydrolase, beta-glucosidase, xylanase, mannanse, β-xylosidase and/or arabinofuranosidase polypeptide sequences using the nucleic acids of the invention. The invention also includes methods for inhibiting the expression of the lignocellulosic enzyme encoding genes and transcripts using the nucleic acids of the invention.

[0180] Also provided are methods for modifying the nucleic acids of the invention, including making variants of nucleic acids of the invention, by, e.g., synthetic ligation reassembly, optimized directed evolution system and/or saturation mutagenesis such as GENE SITE SATURATION MUTAGENESIS (or GSSM). The term “saturation mutagenesis”, GENE SITE SATURATION MUTAGENESIS or GSSM includes a method that uses degenerate oligonucleotide primers to introduce point mutations into a polynucleotide, as described in detail, below. The term “optimized directed evolution system” or “optimized directed evolution” includes a method for reassembling fragments of related nucleic acid sequences, e.g., related genes, and explained in detail, below. The term “synthetic ligation reassembly” or “SLR” includes a method of ligating oligonucleotide fragments in a non-stochastic fashion, and explained in detail, below. The term “variant” refers to polynucleotides or polypeptides of the invention modified at one or more base pairs, codons, introns, exons, or amino acid residues (respectively) yet still retain the biological activity of a lignocellulosic enzyme, e.g., a glycosyl hydrolase, cellulase, endoglucanase, cellobiohydrolase, beta-glucosidase, xylanase, mannanse, β-xylosidase and/or arabinofuranosidase of the invention. Variants can be produced by any number of means included methods such as, for example, error-prone PCR, shuffling, oligonucleotide-directed mutagenesis, assembly PCR, sexual PCR mutagenesis, in vivo mutagenesis, cassette mutagenesis, recursive ensemble mutagenesis, exponential ensemble mutagenesis, site-specific mutagenesis, gene reassembly, GSSM and any combination thereof.

[0181] The nucleic acids of the invention can be made, isolated and/or manipulated by, e.g., cloning and expression of cDNA libraries, amplification of message or genomic DNA by PCR, and the like. For example, exemplary sequences of the invention were initially derived from environmental sources. Thus, in one aspect, the invention provides the lignocellulosic enzyme, e.g., glycosyl hydrolase, cellulase, endoglucanase, cellobiohydrolase, beta-glucosidase, xylanase, mannanse, β-xylosidase and/or arabinofuranosidase enzyme-encoding nucleic acids, and the polypeptides encoded by them, having a common novelty in that they are derived from a common source, e.g., an environmental, mixed culture, or a bacterial source.

[0182] In practicing the methods of the invention, homologous genes can be modified by manipulating a template nucleic acid, as described herein. The invention can be practiced in conjunction with any method or protocol or device known in the art, which are well described in the scientific and patent literature. A “coding sequence of” or a “nucleotide sequence encoding” a particular polypeptide or protein, is a nucleic acid sequence which is transcribed and translated into a polypeptide or protein when placed under the control of appropriate regulatory sequences. The term “gene” means the segment of DNA involved in producing a polypeptide chain; it includes regions preceding and following the coding region (leader and trailer) as well as, where applicable, intervening sequences (introns) between individual coding segments (exons). A promoter sequence is “operably linked to” a coding sequence when RNA polymerase which initiates transcription at the promoter will transcribe the coding sequence into mRNA. “Operably linked” as used herein refers to a functional relationship between two or more nucleic acid (e.g., DNA) segments. It can refer to the functional relationship of transcriptional regulatory sequence to a transcribed sequence. For example, a promoter is operably linked to a coding sequence, such as a nucleic acid of the invention, if it stimulates or modulates the transcription of the coding sequence in an appropriate host cell or other expression system. In one aspect, promoter transcriptional regulatory sequences are operably linked to a transcribed sequence (e.g., a sequence of the invention) and are physically contiguous to the transcribed sequence, i.e., they are cis-acting. However, some transcriptional regulatory sequences, such as enhancers, need not be physically contiguous or located in close proximity to the coding sequences whose transcription they enhance. Promoters used to “drive” transcription of nucleic acids of the invention include, e.g., a viral, bacterial, mammalian or plant promoter; or, a plant promoter; or, a potato, rice, corn, wheat, tobacco or barley promoter; or, a constitutive promoter or a CaMV35S promoter; or, an inducible promoter; or, a tissue-specific promoter or an environmentally regulated or a developmentally regulated promoter; or, a seed-specific, a leaf-specific, a root-specific, a stem-specific or an abscission-induced promoter; or, a seed preferred promoter, a maize gamma zein promoter or a maize ADP-gpp promoter.

[0183] One aspect of the invention is an isolated, synthetic or recombinant nucleic acid comprising one of the sequences of the invention, or a fragment comprising at least 10, 15, 20, 25, 30, 35, 40, 50, 75, 100, 150, 200, 300, 400, or 500 or more consecutive bases of a nucleic acid of the invention. The isolated, synthetic or recombinant nucleic acids may comprise DNA, including cDNA, genomic DNA and synthetic DNA. The DNA may be double-stranded or single-stranded and if single stranded may be the coding strand or non-coding (anti-sense) strand. Alternatively, the isolated, synthetic or recombinant nucleic acids comprise RNA.

[0184] The isolated, synthetic or recombinant nucleic acids of the invention may be used to prepare one of the polypeptides of the invention, or fragments comprising at least 5, 10, 15, 20, 25, 30, 35, 40, 50, 75, 100, or 150 or more consecutive amino acids of one of the polypeptides of the invention. Accordingly, another aspect of the invention is an isolated, synthetic or recombinant nucleic acid which encodes one of the polypeptides of the invention, or fragments comprising at least 5, 10, 15, 20, 25, 30, 35, 40, 50, 75, 100, or 150 or more consecutive amino acids of one of the polypeptides of the invention. The to coding sequences of these nucleic acids may be identical to one of the coding sequences of one of the nucleic acids of the invention or may be different coding sequences which encode one of the of the invention having at least 5, 10, 15, 20, 25, 30, 35, 40, 50, 75, 100, or 150 or more consecutive amino acids of one of the polypeptides of the invention, as a result of the redundancy or degeneracy of the genetic code. The genetic code is well known to those of skill in the art and can be obtained, e.g., on page 214 of B. Lewin, Genes VI, Oxford University Press, 1997.

[0185] The nucleic acids encoding polypeptides of the invention include but are not limited to: the coding sequence of a nucleic acid of the invention and additional coding sequences, such as leader sequences or proprotein sequences and non-coding sequences, such as introns or non-coding sequences 5′ and/or 3′ of the coding sequence. Thus, as used herein, the term “polynucleotide encoding a polypeptide” encompasses a polynucleotide which includes the coding sequence for the polypeptide as well as a polynucleotide which includes additional coding and/or non-coding sequence.

[0186] In one aspect, the nucleic acid sequences of the invention are mutagenized using conventional techniques, such as site directed mutagenesis, or other techniques familiar to those skilled in the art, to introduce silent changes into the polynucleotides o of the invention. As used herein, “silent changes” include, for example, changes which do not alter the amino acid sequence encoded by the polynucleotide. Such changes may be desirable in order to increase the level of the polypeptide produced by host cells containing a vector encoding the polypeptide by introducing codons or codon pairs which occur frequently in the host organism.

[0187] The invention also relates to polynucleotides which have nucleotide changes which result in amino acid substitutions, additions, deletions, fusions and truncations in the polypeptides of the invention. Such nucleotide changes may be introduced using techniques such as site directed mutagenesis, random chemical mutagenesis, exonuclease III deletion and other recombinant DNA techniques. Alternatively, such nucleotide changes may be naturally occurring allelic variants which are isolated by identifying nucleic acids which specifically hybridize to probes comprising at least 10, 15, 20, 25, 30, 35, 40, 50, 75, 100, 150, 200, 300, 400, or 500 consecutive bases of one of the sequences of the invention (or the sequences complementary thereto) under conditions of high, moderate, or low stringency as provided herein.

[0188] General Techniques

[0189] The nucleic acids used to practice this invention, whether RNA, siRNA, miRNA, antisense nucleic acid, cDNA, genomic DNA, vectors, viruses or hybrids thereof, may be isolated from a variety of sources, genetically engineered, amplified, and/or expressed/ generated recombinantly. Recombinant polypeptides (e.g., the lignocellulosic enzyme, e.g., glycosyl hydrolase, cellulase, endoglucanase, cellobiohydrolase, beta-glucosidase, xylanase, mannanse, β-xylosidase and/or arabinofuranosidase enzymes) generated from these nucleic acids can be individually isolated or cloned and tested for a desired activity. Any recombinant expression system can be used, including bacterial, mammalian, yeast, insect or plant cell expression systems.

[0190] Alternatively, these nucleic acids can be synthesized in vitro by well-known chemical synthesis techniques, as described in, e.g., Adams (1983) J. Am. Chem. Soc. 105:661; Belousov (1997) Nucleic Acids Res. 25:3440-3444; Frenkel (1995) Free Radic. Biol. Med. 19:373-380; Blommers (1994) Biochemistry 33:7886-7896; Narang (1979) Meth. Enzymol. 68:90; Brown (1979) Meth. Enzymol. 68:109; Beaucage (1981) Tetra. Lett. 22:1859; U.S. Pat. No. 4,458,066.

[0191] This invention encompasses “nucleic acid” or “nucleic acid sequence” as oligonucleotides, nucleotides, polynucleotides, fragments of any of these, to DNA, cDNA, gDNA, RNA (message), RNAi, etc. of genomic or synthetic origin or derivation, any of which may be single-stranded or double-stranded and may represent a sense or antisense (complementary) strand, to peptide nucleic acid (PNA), or to any DNA-like or RNA-like material, natural or synthetic in origin. This invention encompasses “nucleic acids” or “nucleic acid sequences” including any sense or antisense sequences, peptide nucleic acids (PNA), any DNA-like or RNA-like material, natural or synthetic in origin, including, e.g., iRNA, ribonucleoproteins (e.g., e.g., double stranded iRNAs, e.g., iRNPs). This invention encompasses nucleic acids, i.e., oligonucleotides, containing known analogues of natural nucleotides. This invention encompasses nucleic-acid-like structures with synthetic backbones, which is one possible embodiment of the synthetic nucleic acids of the invention; see e.g., Mata (1997) Toxicol. Appl. Pharmacol. 144:189-197; Strauss-Soukup (1997) Biochemistry 36:8692-8698; Samstag (1996) Antisense Nucleic Acid Drug Dev 6:153-156. “Oligonucleotide” includes either a single stranded polydeoxynucleotide or two complementary polydeoxynucleotide strands which may be chemically synthesized. This invention encompasses synthetic nucleic acids and/or oligonucleotides that have no 5′ phosphate; thus will not ligate to another oligonucleotide without adding a phosphate with an ATP in the presence of a kinase; a synthetic oligonucleotide can ligate to a fragment that has not been dephosphorylated.

[0192] Alternative structures of synthetic nucleic acids and/or oligonucleotides, and methods for making them, are well known in the art and all are incorporated for making and using this invention.

[0193] The invention provides “recombinant” polynucleotides (and proteins), and in one is aspect the recombinant nucleic acids are adjacent to a “backbone” nucleic acid, which it is not adjacent in its natural environment. In one aspect, to be “enriched” the nucleic acids will represent about 1%, 5%, 10%, 15%, 20%, 25% or more of the number of nucleic acid inserts in a population of nucleic acid backbone molecules. In one aspect, backbone molecules comprise nucleic acids such as expression vectors, self-replicating nucleic acids, viruses, integrating nucleic acids and other vectors or nucleic acids used to maintain or manipulate a nucleic acid insert of interest. In one aspect, the enriched nucleic acids represent about 1%, 5%, 10%, 15%, 20%, 25% or more of the number of nucleic acid inserts in the population of recombinant backbone molecules. In one aspect, the enriched nucleic acids represent about 50%, 50%, 51%, 52%, 53%, 54%, 55%, 56%, 57%, 58%, 59%, 60%, 61%, 62%, 63%, 64%, 65%, 66%, 67%, 68%, 69%, 70%, 71%, 72%, 73%, 74%, 75% or more of the number of nucleic acid inserts in the population of recombinant backbone molecules. In a one aspect, the enriched nucleic acids represent about 90%, 91%, 92%, 93%, 94%, 95%, 96%, 97%, 98%, 99% or more of the number of nucleic acid inserts in the population of recombinant backbone molecules.

[0194] Techniques for the manipulation of nucleic acids, such as, e.g., subcloning, labeling probes (e.g., random-primer labeling using Klenow polymerase, nick translation, amplification), sequencing, hybridization and the like are well described in the scientific and patent literature, see, e.g., Sambrook, ed., MOLECULAR CLONING: A LABORATORY MANUAL (2ND ED.), Vols. 1-3, Cold Spring Harbor Laboratory, (1989); CURRENT PROTOCOLS IN MOLECULAR BIOLOGY, Ausubel, ed. John Wiley & Sons, Inc., New York (1997); LABORATORY TECHNIQUES IN BIOCHEMISTRY AND MOLECULAR BIOLOGY: HYBRIDIZATION WITH NUCLEIC ACID PROBES, Part I. Theory and Nucleic Acid Preparation, Tijssen, ed. Elsevier, N.Y. (1993).

[0195] Another useful means of obtaining and manipulating nucleic acids used to practice the methods of the invention is to clone from genomic samples, and, if desired, screen and re-clone inserts isolated or amplified from, e.g., genomic clones or cDNA clones. Sources of nucleic acid used in the methods of the invention include genomic or cDNA libraries contained in, e.g., mammalian artificial chromosomes (MACs), see, e.g., U.S. Pat. Nos. 5,721,118; 6,025,155; human artificial chromosomes, see, e.g., Rosenfeld (1997) Nat. Genet. 15:333-335; yeast artificial chromosomes (YAC); bacterial artificial chromosomes (BAC); P1 artificial chromosomes, see, e.g., Woon (1998) Genomics 50:306-316; P1-derived vectors (PACs), see, e.g., Kern (1997) Biotechniques 23:120-124; cosmids, recombinant viruses, phages or plasmids.

[0196] In one aspect, a nucleic acid encoding a polypeptide of the invention is assembled in appropriate phase with a leader sequence capable of directing secretion of the translated polypeptide or fragment thereof.

[0197] The invention provides fusion proteins and nucleic acids encoding them. A polypeptide of the invention can be fused to a heterologous peptide or polypeptide, such as N-terminal identification peptides which impart desired characteristics, such as increased stability or simplified purification. Peptides and polypeptides of the invention can also be synthesized and expressed as fusion proteins with one or more additional domains linked thereto for, e.g., producing a more immunogenic peptide, to more readily isolate a recombinantly synthesized peptide, to identify and isolate antibodies and antibody-expressing B cells, and the like. Detection and purification facilitating domains include, e.g., metal chelating peptides such as polyhistidine tracts and histidine-tryptophan modules that allow purification on immobilized metals, protein A domains that allow purification on immobilized immunoglobulin, and the domain utilized in the FLAGS extension/affinity purification system (Immunex Corp, Seattle Wash.). The inclusion of a cleavable linker sequences such as Factor Xa or enterokinase (Invitrogen, San Diego Calif.) between a purification domain and the motif-comprising peptide or polypeptide to facilitate purification. For example, an expression vector can include an epitope-encoding nucleic acid sequence linked to six histidine residues followed by a thioredoxin and an enterokinase cleavage site (see e.g., Williams (1995) Biochemistry 34:1787-1797; Dobeli (1998) Protein Expr. Purif. 12:404-414). The histidine residues facilitate detection and purification while the enterokinase cleavage site provides a means for purifying the epitope from the remainder of the fusion protein. Technology pertaining to vectors encoding fusion proteins and application of fusion proteins are well described in the scientific and patent literature, see e.g., Kroll (1993) DNA Cell. Biol., 12:441-53.

[0198] Transcriptional and Translational Control Sequences

[0199] The invention provides nucleic acid (e.g., DNA) sequences of the invention operatively linked to expression (e.g., transcriptional or translational) control sequence(s), e.g., promoters or enhancers, to direct or modulate RNA synthesis/expression. The expression control sequence can be in an expression vector. Exemplary bacterial promoters include lad, lacZ, T3, T7, gpt, lambda PR, PL and trp. Exemplary is eukaryotic promoters include CMV immediate early, HSV thymidine kinase, early and late SV40, LTRs from retrovirus, and mouse metallothionein I.

[0200] As used herein, the term “promoter” includes all sequences capable of driving transcription of a coding sequence in a cell, e.g., a plant or animal cell. Thus, promoters used in the constructs of the invention include cis-acting transcriptional control elements and regulatory sequences that are involved in regulating or modulating the timing and/or rate of transcription of a gene. For example, a promoter can be a cis-acting transcriptional control element, including an enhancer, a promoter, a transcription terminator, an origin of replication, a chromosomal integration sequence, 5′ and 3′ untranslated regions, or an intronic sequence, which are involved in transcriptional regulation. These cis-acting sequences can interact with proteins or other biomolecules to carry out (turn on/off, regulate, modulate, etc.) transcription. “Constitutive” promoters are those that drive expression continuously under most environmental conditions and states of development or cell differentiation. “Inducible” or “regulatable” promoters direct expression of the nucleic acid of the invention under the influence of environmental conditions or developmental conditions. Examples of environmental conditions that may affect transcription by inducible promoters include anaerobic conditions, elevated temperature, drought, or the presence of light.

[0201] “Tissue-specific” promoters are transcriptional control elements that are only active in particular cells or tissues or organs, e.g., in plants or animals. Tissue-specific regulation may be achieved by certain intrinsic factors which ensure that genes encoding proteins specific to a given tissue are expressed. Such factors are known to exist in mammals and plants so as to allow for specific tissues to develop.

[0202] Promoters suitable for expressing a polypeptide in bacteria include the E. coli lac or trp promoters, the lad promoter, the lacZ promoter, the T3 promoter, the T7 promoter, the gpt promoter, the lambda PR promoter, the lambda PL promoter, promoters from operons encoding glycolytic enzymes such as 3-phosphoglycerate kinase (PGK), and the acid phosphatase promoter. Eukaryotic promoters include the CMV immediate early promoter, the HSV thymidine kinase promoter, heat shock promoters, the early and late SV40 promoter, LTRs from retroviruses, and the mouse metallothionein-I promoter. Other promoters known to control expression of genes in prokaryotic or eukaryotic cells or their viruses may also be used. Promoters suitable for expressing the polypeptide or fragment thereof in bacteria include the E. coli lac or trp promoters, the lacI promoter, the lacZ promoter, the T3 promoter, the T7 promoter, the gpt promoter, the lambda P_{R} promoter, the lambda P_{L} promoter, promoters from operons encoding glycolytic enzymes such as 3-phosphoglycerate kinase (PGK) and the acid phosphatase promoter. Fungal promoters include the α-factor promoter. Eukaryotic promoters include the CMV immediate early promoter, the HSV thymidine kinase promoter, heat shock promoters, the early and late SV40 promoter, LTRs from retroviruses and the mouse metallothionein-I promoter. Other promoters known to control expression of genes in prokaryotic or eukaryotic cells or their viruses may also be used.

[0203] Tissue-Specific Plant Promoters

[0204] The invention provides expression cassettes that can be expressed in a plant part (e.g., seed, leaf, root or seed) or tissue-specific manner, e.g., that can express a lignocellulosic enzyme of the invention, e.g., a glycosyl hydrolase, cellulase, endoglucanase, cellobiohydrolase, beta-glucosidase, xylanase, mannanse, β-xylosidase and/or arabinofuranosidase enzyme of the invention in a part-specific or tissue-specific manner. The invention also provides plants or seeds that express a lignocellulosic enzyme of the invention in a stage-specific and/or tissue-specific manner. The tissue-specificity can be seed specific, stem specific, leaf specific, root specific, fruit specific and the like. The nucleic acids of the invention can be operably linked to any promoter, e.g., as in an expression cassette (such as a vector, plasmid, and the like) that provides very high expression in a plant, plant part (e.g., a root, stem, seed or fruit) or plant seed, including promoters that are active in any part of the plant (but also expressing at a high level in at least one part, if not all, part of the plant), or alternatively, the promoter can express a nucleic acid of the invention at a high level in less than all of the plant, e.g., in a tissue-specific manner. In one aspect, the promoter is constitutive and results in a constitutive high level of expression; alternatively, the promoter can be inducible, i.e., it can be induced to produce a high level of expression of a nucleic acid of the invention, e.g., by application of a chemical, infection of an agent that makes an inducing chemical or protein, by a normal or induced maturation or growth process where the plant endogenously turns certain genes and promoters on and off.

[0205] In one aspect, a constitutive promoter such as the CaMV 35S promoter can be used for expression in specific parts of the plant or seed or throughout the plant. For example, for overexpression, a plant promoter fragment can be employed which will direct expression of a nucleic acid in some or all tissues of a plant, e.g., a regenerated plant. Such promoters are referred to herein as “constitutive” promoters and are active under most environmental conditions and states of development or cell differentiation.

[0206] Examples of constitutive promoters include the cauliflower mosaic virus (CaMV) 35S transcription initiation region (the Cauliflower Mosaic Virus promoter; see, e.g., U.S. Pat. No. 5,110,732); the 1′- or 2′-promoter derived from T-DNA of Agrobacterium tumefaciens; and other transcription initiation regions from various plant genes known to those of skill.

[0207] Promoters, enhancers and/or other transcriptional or translations regulatory motifs that can be used to practice this invention include those from any plant, animal or microorganism gene known in the art, e.g., including ACT11 from Arabidopsis (Huang (1996) Plant Mol. Biol. 33:125-139); Cat3 from Arabidopsis (GenBank No. U43147, Zhong (1996) Mol. Gen. Genet. 251:196-203); the gene encoding stearoyl-acyl carrier protein desaturase from Brassica napus (Genbank No. X74782, Solocombe (1994) Plant Physiol. 104:1167-1176); GPc1 from maize (GenBank No. X15596; Martinez (1989) J. Mol. Biol 209:551-565); the Gpc2 from maize (GenBank No. U45855, Manjunath (1997) Plant Mol. Biol. 33:97-112); plant promoters described in U.S. Pat. Nos. 4,962,028; 5,633,440.

[0208] The invention uses tissue-specific, inducible or constitutive promoters and/or enhancers derived from viruses which can include, e.g., the tobamovirus subgenomic promoter (Kumagai (1995) Proc. Natl. Acad. Sci. USA 92:1679-1683; the rice tungro bacilliform virus (RTBV), which replicates only in phloem cells in infected rice plants, with its promoter which drives strong phloem-specific reporter gene expression; the cassava vein mosaic virus (CVMV) promoter, with highest activity in vascular elements, in leaf mesophyll cells, and in root tips (Verdaguer (1996) Plant Mol. Biol. 31:1129-1139). In one aspect, the invention uses the cestrum yellow leaf curling virus promoter as described, e.g., in U.S. Pat. No. 7,166,770; 10^{th} IAPTC&B Congress “Plant Biotechnology 2002 and beyond.” Kononova, et al., p. 237-238. Jun. 24, 2002. In one aspect, the invention uses the corn (maize) endosperm specific promoter as described, e.g., in U.S. Pat. No. 7,157,623. In one aspect, the invention uses promoters that regulate the expression of zinc finger proteins, as described, e.g., in U.S. Pat. No. 7,151,201. In one aspect, to the invention uses the corn (maize) promoters as described, e.g., in U.S. Pat. No. 7,138,278. In one aspect, the invention uses “arcelin” promoters (including, e.g., the Arcelin-3, Arcelin-4 and Arcelin-5 promoters) capable of transcribing a heterologous nucleic acid sequence at high levels in plants, as described, e.g., in U.S. Pat. No. 6,927,321. In one aspect, the invention uses plant embryo-specific promoters, as described, e.g., in U.S. Pat. Nos. 6,781,035; 6,235,975. In one aspect, the invention uses promoters for potato tuber specific expression, as described, e.g., in U.S. Pat. No. 5,436,393. In one aspect, the invention uses promoters for leaf-specific expression, as described, e.g., in U.S. Pat. No. 6,229,067. In one aspect, the invention uses promoters for mesophyll-specific expression, as described, e.g., in U.S. Pat. No. 6,610,840.

[0209] Seed-preferred regulatory sequences (e.g., seed-specific promoters) are described e.g., in U.S. Pat. Nos. 7,081,566; 7,081,565; 7,078,588; 6,566,585; 6,642,437; 6,410,828; 6,066,781; 5,889,189; 5,850,016.

[0210] In one aspect, the plant promoter directs expression of the lignocellulosic enzyme, e.g., glycosyl hydrolase, cellulase, endoglucanase, cellobiohydrolase, beta-glucosidase, xylanase, mannanse, β-xylosidase and/or arabinofuranosidase enzyme-expressing nucleic acid in a specific tissue, organ or cell type (i.e. tissue-specific promoters) or may be otherwise under more precise environmental or developmental control or under the control of an inducible promoter. Examples of environmental conditions that may affect transcription include anaerobic conditions, elevated temperature, the presence of light, or sprayed with chemicals/hormones. For example, the invention incorporates the drought-inducible promoter of maize (Busk (1997) supra); the cold, drought, and high salt inducible promoter from potato (Kirch (1997) Plant Mol. Biol. 33:897 909).

[0211] Any tissue-specific regulated coding sequence, genes and/or transcriptional regulatory sequence (including promoters and enhancers) from any plant can be used to practice this invention; including, e.g., tissue-specific promoters and enhancers and coding sequence; or, promoters and enhancers or genes, including the coding sequences or genes encoding the seed storage proteins, such as napin, cruciferin, beta-conglycinin, and phaseolin, zein or oil body proteins (such as oleosin), or genes involved in fatty acid biosynthesis (including acyl carrier protein, stearoyl-ACP desaturase, and fatty acid desaturases (fad 2-1)), and other genes expressed during embryo development (such as Bce4, see, for example, EP 255378 and Kridl (1991) Seed Science Research 1:209), and promoters and enhancers associated with these genes and protein coding sequences.

[0212] Exemplary tissue-specific promoters and enhancers which can be used to practice this invention include tissue-specific promoters and enhancers from the following plant genes: lectin (see, e.g., Vodkin (1983) Prog. Clin. Biol. Res. 138:87; Lindstrom (1990) Der. Genet. 11:160), corn alcohol dehydrogenase 1 (see, e.g., Kyozuka (1994) Plant Cell 6(6):799-810; Dennis (1985) Nucleic Acids Res. 13(22):7945-57); corn light harvesting complex (see, e.g., Simpson, (1986) Science, 233:34; Bansal (1992) Proc. Natl. Acad. Sci. USA 89:3654), corn heat shock protein (see, e.g., Odell et al., (1985) Nature, 313:810; pea small subunit RuBP carboxylase (see, e.g., Poulsen et al., (1986) Mol. Gen. Genet., 205:193-200; Cashmore et al., (1983) Gen. Eng. of Plants, Plenum Press, New York, 29-38), Ti plasmid mannopine synthase (see, e.g., Langridge et al., (1989) Proc. Natl. Acad. Sci. USA, 86:3219-3223), Ti plasmid nopaline synthase (Langridge et al., (1989) Proc. Natl. Acad. Sci. USA, 86:3219-3223), petunia chalcone isomerase (see, e.g., vanTunen (1988) EMBO J. 7:1257), bean glycine rich protein 1 (see, e.g., Keller (1989) Genes Dev. 3:1639), truncated CaMV 35s (see, e.g., Odell (1985) Nature 313:810), potato patatin (see, e.g., Wenzler (1989) Plant Mol. Biol. 13:347; root cell (see, e.g., Yamamoto (1990) Nucleic Acids Res. 18:7449), maize zein (see, e.g., Reina (1990) Nucleic Acids Res. 18:6425; Kriz (1987) Mol. Gen. Genet. 207:90; Wandelt (1989) Nucleic Acids Res., 17:2354; Langridge (1983) Cell, 34:1015; Reina (1990) Nucleic Acids Res., 18:7449), ADP-gpp promoter (see, e.g., U.S. Pat. No. 7,102,057); globulin-1 (see, e.g., Belanger (1991) Genetics 129:863), α-tubulin, cab (see, e.g., Sullivan (1989) Mol. Gen. Genet., 215:431), PEPCase (see e.g., Hudspeth & Grula, (1989) Plant Molec. Biol., 12:579-589); R gene complex-associated promoters (see, e.g., Chandler (1989) Plant Cell 1:1175); chalcone synthase promoters (see, e.g., Franken (1991) EMBO J., 10:2605); and/or the soybean heat-shock gene promoter, see, e.g., Lyznik (1995) Plant J. 8(2):177-86.

[0213] In one aspect the invention uses seed-specific transcriptional regulatory elements for seed-specific expression, e.g., including use of the pea vicilin promoter (see, e.g., Czako (1992) Mol. Gen. Genet., 235:33; see also U.S. Pat. No. 5,625,136. Other useful promoters for expression in mature leaves are those that are switched on at the onset of senescence, such as the SAG promoter from Arabidopsis (see, e.g., Gan (1995) Science 270:1986.

[0214] In one aspect the invention uses fruit-specific promoters expressed at or during anthesis through fruit development, at least until the beginning of ripening, as described, e.g., in U.S. Pat. No. 4,943,674. In one aspect the invention uses cDNA clones that are preferentially expressed in cotton fiber, as described, e.g., in John (1992) Proc. Natl. Acad. Sci. USA 89:5769. In one aspect the invention uses cDNA clones from tomato displaying differential expression during fruit development, as described, e.g., in Mansson et al., Gen. Genet., 200:356 (1985), Slater et al., Plant Mol. Biol., 5:137 (1985)). In one aspect the invention uses the promoter for polygalacturonase gene, which is active in fruit ripening; the polygalacturonase gene is described, e.g., in U.S. Pat. Nos. 4,535,060; 4,769,061; 4,801,590; 5,107,065.

[0215] Other examples of tissue-specific promoters that are used to practice this invention include those that direct expression in leaf cells following damage to the leaf (for example, from chewing insects), in tubers (for example, patatin gene promoter), and in fiber cells (an example of a developmentally-regulated fiber cell protein is E6, see, e.g., John (1992) Proc. Natl. Acad. Sci. USA 89:5769. The E6 gene is most active in fiber, although low levels of transcripts are found in leaf, ovule and flower.

[0216] In one aspect, tissue-specific promoters promote transcription only within a certain time frame of developmental stage within that tissue; see, e.g., Blazquez (1998) Plant Cell 10:791-800, characterizing the Arabidopsis LEAFY gene promoter; see also Cardon (1997) Plant J 12:367-77, describing the transcription factor SPL3, which recognizes a conserved sequence motif in the promoter region of the A. thaliana floral meristem identity gene AP1; and Mandel (1995) Plant Molecular Biology, Vol. 29, pp 995-1004, describing the meristem promoter eIF4.

[0217] Tissue specific promoters which are active throughout the life cycle of a particular tissue can be used. In one aspect, the nucleic acids of the invention are operably linked to a promoter active primarily only in cotton fiber cells. In one aspect, the nucleic acids of the invention are operably linked to a promoter active primarily during the stages of cotton fiber cell elongation, e.g., as described by Rinehart (1996) supra. The nucleic acids can be operably linked to the Fb12A gene promoter to be preferentially expressed in cotton fiber cells (Ibid). See also, John (1997) Proc. Natl. Acad. Sci. USA 89:5769-5773; John, et al., U.S. Pat. Nos. 5,608,148 and 5,602,321, describing cotton fiber-specific promoters and methods for the construction of transgenic cotton plants.

[0218] Root-specific promoters may also be used to express the nucleic acids of the invention. Examples of root-specific promoters include the promoter from the alcohol dehydrogenase gene (DeLisle (1990) Int. Rev. Cytol. 123:39-60). Other promoters that can be used to express the nucleic acids of the invention include, e.g., ovule-specific, embryo-specific, endosperm-specific, integument-specific, seed coat-specific promoters, or some combination thereof; a leaf-specific promoter (see, e.g., Busk (1997) Plant J. 11:1285-1295, describing a leaf-specific promoter in maize); the ORF13 promoter from Agrobacterium rhizogenes (which exhibits high activity in roots, see, e.g., Hansen (1997) supra); a maize pollen specific promoter (see, e.g., Guerrero (1990) Mol. Gen. Genet. 224:161 168); a tomato promoter active during fruit ripening, senescence and abscission of leaves and, to a lesser extent, of flowers can be used (see, e.g., Blume (1997) Plant J. 12:731 746); a pistil-specific promoter from the potato SK2 gene (see, e.g., Ficker (1997) Plant Mol. Biol. 35:425 431); the Blec4 gene from pea, which is active in epidermal tissue of vegetative and floral shoot apices of transgenic alfalfa making it a useful tool to target the expression of foreign genes to the epidermal layer of actively growing shoots or fibers; the ovule-specific BEL1 gene (see, e.g., Reiser (1995) Cell 83:735-742, GenBank No. U39944); and/or, the promoter in Klee, U.S. Pat. No. 5,589,583, describing a plant promoter region is capable of conferring high levels of transcription in meristematic tissue and/or rapidly dividing cells.

[0219] In one aspect, plant promoters which are inducible upon exposure to plant hormones, such as auxins, are used to express the nucleic acids of the invention. For example, the invention can use the auxin-response elements E1 promoter fragment (AuxREs) in the soybean (Glycine max L.) (Liu (1997) Plant Physiol. 115:397-407); the auxin-responsive Arabidopsis GST6 promoter (also responsive to salicylic acid and hydrogen peroxide) (Chen (1996) Plant J. 10: 955-966); the auxin-inducible parC promoter from tobacco (Sakai (1996) 37:906-913); a plant biotin response element (Streit (1997) Mol. Plant Microbe Interact. 10:933-937); and, the promoter responsive to the stress hormone abscisic acid (Sheen (1996) Science 274:1900-1902).

[0220] The nucleic acids of the invention can also be operably linked to plant promoters which are inducible upon exposure to chemicals reagents which can be applied to the plant, such as herbicides or antibiotics. For example, the maize In2-2 promoter, activated by benzenesulfonamide herbicide safeners, can be used (De Veylder (1997) Plant Cell Physiol. 38:568-577); application of different herbicide safeners induces distinct gene expression patterns, including expression in the root, hydathodes, and the shoot apical meristem. Coding sequence can be under the control of, e.g., a tetracycline-inducible promoter, e.g., as described with transgenic tobacco plants containing the Avena sativa L. (oat) arginine decarboxylase gene (Masgrau (1997) Plant J. 11:465-473); or, a salicylic acid-responsive element (Stange (1997) Plant J. 11:1315-1324). Using chemically- (e.g., hormone- or pesticide-) induced promoters, i.e., promoter responsive to a chemical which can be applied to the transgenic plant in the field, expression of a polypeptide of the invention can be induced at a particular stage of development or maturation of the plant or plant part (e.g., fruit or seed). Thus, the invention also provides transgenic plants comprising an inducible protein coding sequence (e.g., a gene) encoding a polypeptide of the invention; which alternative can comprise a host range in a broad or a limited range, e.g., limited to target plant species, such as corn, rice, barley, soybean, tomato, wheat, potato or other crops. In one aspect, the inducible protein coding sequence (e.g., a gene) is inducible at any stage of development or maturation of the crop, including plant parts (e.g., fruits or seeds).

[0221] One of skill will recognize that a tissue-specific plant promoter may drive expression of operably linked sequences in tissues other than the target tissue. Thus, in one aspect, a tissue-specific promoter is one that drives expression preferentially in the target tissue or cell type, but may also lead to some expression in other tissues as well.

[0222] The nucleic acids of the invention can also be operably linked to plant promoters which are inducible upon exposure to chemicals reagents. These reagents include, e.g., herbicides, synthetic auxins, or antibiotics which can be applied, e.g., sprayed, onto transgenic plants. In one aspect, inducible expression of the lignocellulosic enzyme, e.g., glycosyl hydrolase, cellulase, endoglucanase, cellobiohydrolase, beta-glucosidase, xylanase, mannanse, β-xylosidase and/or arabinofuranosidase, e.g., inducible expression of the enzyme-encoding nucleic acids of the invention, allows selection of plants with the optimal amount or timing of expression of lignocellulosic enzyme expression and/or activity. The development of plant parts can thus controlled. In this way the invention provides the means to facilitate the harvesting of plants and plant parts. For example, in various embodiments, the maize In2-2 promoter, activated by benzenesulfonamide herbicide safeners, is used (De Veylder (1997) Plant Cell Physiol. 38:568-577); application of different herbicide safeners induces distinct gene expression patterns, including expression in the root, hydathodes, and the shoot apical meristem. Coding sequences of the invention are also under the control of a tetracycline-inducible promoter, e.g., as described with transgenic tobacco plants containing the Avena sativa L. (oat) arginine decarboxylase gene (Masgrau (1997) Plant J. 11:465-473); or, a salicylic acid-responsive element (Stange (1997) Plant J. 11:1315-1324).

[0223] In some aspects, proper polypeptide expression may require polyadenylation region at the 3′-end of the coding region. The polyadenylation region can be derived from the natural gene, from a variety of other plant (or animal or other) genes, or from genes in the Agrobacterial T-DNA.

[0224] Expression Vectors and Cloning Vehicles

[0225] The invention provides expression cassettes, expression vectors and cloning vehicles comprising nucleic acids of the invention, e.g., sequences encoding the lignocellulosic enzyme, e.g., glycosyl hydrolase, cellulase, endoglucanase, cellobiohydrolase, beta-glucosidase, xylanase, mannanse, β-xylosidase and/or arabinofuranosidase enzymes of the invention, or antibodies of the invention.

[0226] The term “expression cassette” as used herein refers to a nucleotide sequence which is capable of affecting expression of a structural gene (i.e., a protein coding sequence, such as a lignocellulosic enzyme, e.g., a glycosyl hydrolase, cellulase, endoglucanase, cellobiohydrolase, beta-glucosidase, xylanase, mannanse, β-xylosidase and/or arabinofuranosidase enzyme of the invention) in a host compatible with such sequences.

[0227] Expression cassettes of the invention can comprise at least a promoter operably linked with the polypeptide coding sequence (e.g., an enzyme or antibody of the invention); and, optionally, with other sequences, e.g., transcription termination signals, signal sequence or CBH coding sequences, and the like.

[0228] Additional factors necessary or helpful in effecting expression may also be used, e.g., enhancers, alpha-factors. Thus, expression cassettes of this invention can also include (comprise, or, be contained within) plasmids, expression vectors, recombinant viruses, any form of recombinant “naked DNA” vector, artificial chromosomes, and the like.

[0229] In one aspect, a vector of the invention comprises a polypeptide coding sequence (e.g., coding sequence for an enzyme or antibody of the invention) and a nucleic acid which can infect, transfect, transiently or permanently transduce a cell. A vector of the invention can be a naked nucleic acid, or a nucleic acid complexed with protein or lipid. A vector of the invention can comprise viral or bacterial nucleic acids and/or proteins, and/or membranes (e.g., a cell membrane, a viral lipid envelope, etc.). A vector of the invention can comprise replicons (e.g., RNA replicons, bacteriophages) to which fragments of DNA may be attached and become replicated. Vectors of the invention thus include, but are not limited to RNA, autonomous self-replicating circular or linear DNA or RNA (e.g., plasmids, viruses, and the like, see, e.g., U.S. Pat. No. 5,217,879), and include both the expression and non-expression plasmids.

[0230] A recombinant microorganism or cell culture of the invention can comprise—can host—an “expression vector”, which can comprise one or both of extra-chromosomal circular and/or linear DNA and/or DNA that has been incorporated into the host chromosome(s). In one aspect, a vector is maintained by a host cell (e.g., a plant cell), and alternatively the vector is either stably replicated by the cells during mitosis as an autonomous structure, or is incorporated within the host's genome.

[0231] Expression vectors and cloning vehicles of the invention can comprise viral particles, baculovirus, phage, plasmids, phagemids, cosmids, fosmids, artificial chromosomes (e.g., yeast or bacterial artificial chromosomes), viral DNA (e.g., vaccinia, adenovirus, foul pox virus, pseudorabies and derivatives of SV40), P1-based artificial chromosomes, yeast plasmids, yeast artificial chromosomes, and any other vectors specific for specific hosts of interest (such as bacillus, Aspergillus and yeast). Vectors of the invention can include chromosomal, non-chromosomal and synthetic DNA sequences. Large numbers of suitable vectors are known to those of skill in the art, and are commercially available.

[0232] Exemplary vectors include: bacterial: pQE™ vectors (Qiagen), pBLUESCRIPT™ plasmids, pNH vectors, (lambda-ZAP vectors (Stratagene); ptrc99a, pKK223-3, pDR540, pRIT2T (Pharmacia); Eukaryotic: pXT1, pSG5 (Stratagene), pSVK3, pBPV, pMSG, pSVLSV40 (Pharmacia). However, any other plasmid or other vector may be used so long as they are replicable and viable in the host. Low copy number or high copy number vectors may be employed with the present invention. Plasmids used to practice this invention can be commercially available, publicly available on an unrestricted basis, or can be constructed from available plasmids in accord with published procedures. Equivalent plasmids to those described herein are known in the art and will be apparent to the ordinarily skilled artisan.

[0233] The expression vector can comprise a promoter, a ribosome binding site for translation initiation and a transcription terminator. The vector may also include appropriate sequences for amplifying expression. Mammalian expression vectors can comprise an origin of replication, any necessary ribosome binding sites, a polyadenylation site, splice donor and acceptor sites, transcriptional termination sequences, and 5′ flanking non-transcribed sequences. In some aspects, DNA sequences derived from the SV40 splice and polyadenylation sites may be used to provide the required non-transcribed genetic elements.

[0234] In one aspect, the expression vectors contain one or more selectable marker genes to permit selection of host cells containing the vector. Such selectable markers include genes encoding dihydrofolate reductase or genes conferring neomycin resistance for eukaryotic cell culture, genes conferring tetracycline or ampicillin resistance in E. coli, and the S. cerevisiae TRP1 gene. Promoter regions can be selected from any desired gene using chloramphenicol transferase (CAT) vectors or other vectors with selectable markers.

[0235] In one aspect, vectors for expressing the polypeptide or fragment thereof in eukaryotic cells contain enhancers to increase expression levels. Enhancers are cis-acting elements of DNA that can be from about 10 to about 300 by in length. They can act on a promoter to increase its transcription. Exemplary enhancers include the SV40 enhancer on the late side of the replication origin by 100 to 270, the cytomegalovirus early promoter enhancer, the polyoma enhancer on the late side of the replication origin, and the adenovirus enhancers.

[0236] A nucleic acid sequence can be inserted into a vector by a variety of procedures. In general, the sequence is ligated to the desired position in the vector following digestion of the insert and the vector with appropriate restriction endonucleases. Alternatively, blunt ends in both the insert and the vector may be ligated. A variety of cloning techniques are known in the art, e.g., as described in Ausubel and Sambrook. Such procedures and others are deemed to be within the scope of those skilled in the art.

[0237] The vector can be in the form of a plasmid, a viral particle, or a phage. Other vectors include chromosomal, non-chromosomal and synthetic DNA sequences, derivatives of SV40; bacterial plasmids, phage DNA, baculovirus, yeast plasmids, vectors derived from combinations of plasmids and phage DNA, viral DNA such as vaccinia, adenovirus, fowl pox virus, and pseudorabies. A variety of cloning and expression vectors for use with prokaryotic and eukaryotic hosts are described by, e.g., Sambrook.

[0238] Particular bacterial vectors which can be used include the commercially available plasmids comprising genetic elements of the well known cloning vector pBR322 (ATCC 37017), pKK223-3 (Pharmacia Fine Chemicals, Uppsala, Sweden), GEM1 (Promega Biotec, Madison, Wis., USA) pQE70, pQE60, pQE-9 (Qiagen), pD10, psiX174 pBLUESCRIPT II KS, pNH8A, pNH16a, pNH18A, pNH46A (Stratagene), ptrc99a, pKK223-3, pKK233-3, DR540, pRIT5 (Pharmacia), pKK232-8 and pCM7. Particular eukaryotic vectors include pSV2CAT, pOG44, pXT1, pSG (Stratagene) pSVK3, pBPV, pMSG, and pSVL (Pharmacia). However, any other vector may be used as long as it is replicable and viable in the host cell.

[0239] The nucleic acids of the invention can be expressed in expression cassettes, vectors or viruses and transiently or stably expressed in plant cells and seeds. One exemplary transient expression system uses episomal expression systems, e.g., cauliflower mosaic virus (CaMV) viral RNA generated in the nucleus by transcription of an episomal mini-chromosome containing supercoiled DNA, see, e.g., Covey (1990) Proc. Natl. Acad. Sci. USA 87:1633-1637. Alternatively, coding sequences, i.e., all or sub-fragments of sequences of the invention can be inserted into a plant host cell genome becoming an integral part of the host chromosomal DNA. Sense or antisense transcripts can be expressed in this manner. A vector comprising the sequences (e.g., promoters or coding regions) from nucleic acids of the invention can comprise a marker gene that confers a selectable phenotype on a plant cell or a seed. For example, the marker may encode biocide resistance, e.g., antibiotic resistance, such as resistance to kanamycin, G418, bleomycin, hygromycin, or herbicide resistance, such as resistance to chlorosulfuron or Basta.

[0240] Expression vectors capable of expressing nucleic acids and proteins in plants are well known in the art, and can include, e.g., vectors from Agrobacterium spp., potato virus X (see, e.g., Angell (1997) EMBO J. 16:3675-3684), tobacco mosaic virus (see, e.g., Casper (1996) Gene 173:69-73), tomato bushy stunt virus (see, e.g., Hillman (1989) Virology 169:42-50), tobacco etch virus (see, e.g., Dolja (1997) Virology 234:243-252), bean golden mosaic virus (see, e.g., Morinaga (1993) Microbiol Immunol. 37:471-476), cauliflower mosaic virus (see, e.g., Cecchini (1997) Mol. Plant Microbe Interact. 10:1094-1101), maize Ac/Ds transposable element (see, e.g., Rubin (1997) Mol. Cell. Biol. 17:6294-6302; Kunze (1996) Curr. Top. Microbiol. Immunol. 204:161-194), and the maize suppressor-mutator (Spm) transposable element (see, e.g., Schlappi (1996) Plant Mol. Biol. 32:717-725); and derivatives thereof.

[0241] In one aspect, the expression vector can have two replication systems to allow it to be maintained in two organisms, for example in mammalian or insect cells for expression and in a prokaryotic host for cloning and amplification. Furthermore, for integrating expression vectors, the expression vector can contain at least one sequence homologous to the host cell genome. It can contain two homologous sequences which flank the expression construct. The integrating vector can be directed to a specific locus in the host cell by selecting the appropriate homologous sequence for inclusion in the vector. Constructs for integrating vectors are well known in the art.

[0242] Expression vectors of the invention may also include a selectable marker gene to allow for the selection of bacterial strains that have been transformed, e.g., genes which render the bacteria resistant to drugs such as ampicillin, chloramphenicol, erythromycin, kanamycin, neomycin and tetracycline. Selectable markers can also include biosynthetic genes, such as those in the histidine, tryptophan and leucine biosynthetic pathways.

[0243] The DNA sequence in the expression vector is operatively linked to an appropriate expression control sequence(s) (promoter) to direct RNA synthesis.

[0244] Particular named bacterial promoters include lacI, lacZ, T3, T7, gpt, lambda P_{R}, P_{L} and trp. Eukaryotic promoters include CMV immediate early, HSV thymidine kinase, early and late SV40, LTRs from retrovirus and mouse metallothionein-I. Selection of the appropriate vector and promoter is well within the level of ordinary skill in the art. The expression vector also contains a ribosome binding site for translation initiation and a transcription terminator. The vector may also include appropriate sequences for amplifying expression. Promoter regions can be selected from any desired gene using chloramphenicol transferase (CAT) vectors or other vectors with selectable markers. In addition, the expression vectors in one aspect contain one or more selectable marker genes to provide a phenotypic trait for selection of transformed host cells such as dihydrofolate reductase or neomycin resistance for eukaryotic cell culture, or such as tetracycline or ampicillin resistance in E. coli.

[0245] Mammalian expression vectors may also comprise an origin of replication, any necessary ribosome binding sites, a polyadenylation site, splice donor and acceptor sites, transcriptional termination sequences and 5′ flanking nontranscribed sequences. In some aspects, DNA sequences derived from the SV40 splice and polyadenylation sites may be used to provide the required nontranscribed genetic elements.

[0246] Vectors for expressing the polypeptide or fragment thereof in eukaryotic cells may also contain enhancers to increase expression levels. Enhancers are cis-acting elements of DNA, usually from about 10 to about 300 by in length that act on a promoter to increase its transcription. Examples include the SV40 enhancer on the late side of the replication origin by 100 to 270, the cytomegalovirus early promoter enhancer, the polyoma enhancer on the late side of the replication origin and the adenovirus enhancers.

[0247] In addition, the expression vectors can contain one or more selectable marker genes to permit selection of host cells containing the vector. Such selectable markers include genes encoding dihydrofolate reductase or genes conferring neomycin resistance for eukaryotic cell culture, genes conferring tetracycline or ampicillin resistance in E. coli and the S. cerevisiae TRP1 gene.

[0248] In some aspects, the nucleic acid encoding one of the polypeptides of the invention, or fragments comprising at least about 5, 10, 15, 20, 25, 30, 35, 40, 50, 75, 100, or 150 or more consecutive amino acids thereof is assembled in appropriate phase with a leader sequence capable of directing secretion of the translated polypeptide or fragment thereof. In one aspect, the nucleic acid can encode a fusion polypeptide in which one of the polypeptides of the invention, or fragments comprising at least 5, 10, 15, 20, 25, 30, 35, 40, 50, 75, 100, or 150 or more consecutive amino acids thereof is fused to heterologous peptides or polypeptides, such as N-terminal identification peptides which impart desired characteristics, such as increased stability or simplified purification.

[0249] The appropriate DNA sequence may be inserted into the vector by a variety of procedures. In general, the DNA sequence is ligated to the desired position in the vector following digestion of the insert and the vector with appropriate restriction endonucleases. Alternatively, blunt ends in both the insert and the vector may be ligated. A variety of cloning techniques are disclosed in Ausubel et al. Current Protocols in Molecular Biology, John Wiley 503 Sons, Inc. 1997 and Sambrook et al., Molecular Cloning: A Laboratory Manual 2nd Ed., Cold Spring Harbor Laboratory Press (1989. Such procedures and others are deemed to be within the scope of those skilled in the art.

[0250] The vector may be, for example, in the form of a plasmid, a viral particle, or a phage. Other vectors include chromosomal, nonchromosomal and synthetic DNA sequences, derivatives of SV40; bacterial plasmids, phage DNA, baculovirus, yeast plasmids, vectors derived from combinations of plasmids and phage DNA, viral DNA such as vaccinia, adenovirus, fowl pox virus and pseudorabies. A variety of cloning and expression vectors for use with prokaryotic and eukaryotic hosts are described by Sambrook, et al., Molecular Cloning: A Laboratory Manual, 2nd Ed., Cold Spring Harbor, N.Y., (1989).

[0251] Host Cells and Transformed Cells

[0252] The invention also provides a transformed cell comprising a nucleic acid sequence of the invention, e.g., a sequence encoding a lignocellulosic enzyme, e.g., a glycosyl hydrolase, cellulase, endoglucanase, cellobiohydrolase, beta-glucosidase, xylanase, mannanse, β-xylosidase and/or arabinofuranosidase enzyme of the invention, or a vector of the invention.

[0253] The invention provides “transgenic plants” including plants or plant cells, and plant cell cultures (see, e.g., U.S. Pat. Nos. 7,045,354; 6,127,145; 5,693,506; 5,407,816) derived from those cells, including protoplasts, into which a heterologous nucleic acid sequence has been inserted, e.g., the nucleic acids and various recombinant constructs (e.g., expression cassettes) of the invention.

[0254] The host cell may be any of the host cells familiar to those skilled in the art, including prokaryotic cells, eukaryotic cells, such as bacterial cells, fungal cells, yeast cells, mammalian cells, insect cells, or plant cells. Exemplary bacterial cells include any species of Escherichia, Salmonella, Streptomyces, Pseudomonas, Staphylococcus or Bacillus, including, e.g., Escherichia coli, Lactococcus lactis, Bacillus subtilis, Bacillus cereus, Salmonella typhimurium, Pseudomonas fluorescens. Exemplary yeast cells include any species of Pichia, Saccharomyces, Schizosaccharomyces, Kluvveromvces, Hansenula, Aspergillus or Schwanniomyces, including Pichia pastoris, Saccharomyces cerevisiae, Schizosaccharomyces pombe, Kluvveromvces lactis, Hansenula polymorpha, or filamentous fungi, e.g. Trichoderma, Aspergillus sp., including Aspergillus niger, Aspergillus phoenicis, Aspergillus carbonarius. Exemplary insect cells include any species of Spodoptera or Drosophila, including Drosophila S2 and Spodoptera Sf9. Exemplary animal cells include CHO, COS or Bowes melanoma or any mouse or human cell line. The selection of an appropriate host is within the abilities of those skilled in the art. Techniques for transforming a wide variety of higher plant species are well known and described in the technical and scientific literature. See, e.g., Weising (1988) Ann. Rev. Genet. 22:421-477; U.S. Pat. No. 5,750,870.

[0255] In alternative embodiments, the polypeptides (e.g., enzymes) of this invention are used in industrial processes in a variety of forms, including cell-based systems and/or as partially or substantially purified forms, or in mixtures or other formulations, for, e.g., biofuel processing and production. In one aspect, commercial (e.g., “upscaled”) enzyme production systems are used, and this invention can use any polypeptide production system known the art, including any cell-based expression system, which include numerous strains, including any eukaryotic or prokaryotic system, including any insect, microbial, yeast, bacterial and/or fungal expression system; these alternative expression systems are well known and discussed in the literature and all are io contemplated for commercial use for producing and using the enzymes of the invention. For example, Bacillus species can be used for industrial production (see, e.g., Canadian Journal of Microbiology, 2004 Jan., 50(1):1-17). Alternatively, Streptomyces species, such as S. lividans, S. coelicolor, S. limosus, S. rimosus, S. roseosporus, and S. lividans can be used for industrial and sustainable production hosts (see, e.g., Appl Environ Microbiol. 2006 August; 72(8): 5283-5288). Aspergillus strains such as Aspergillus phoenicis, A. niger and A. carbonarius can be used to practice this invention, e.g., to produce an enzyme, such as a beta-glucosidase, of this invention (see, e.g., World Journal of Microbiology and Biotechnology, 2001, 17(5):455-461). Any Fusarium sp. can be used in an expression system to practice this invention, including e.g., Fusarium graminearum; see e.g., Royer et al. Bio/Technology 13:1479-1483 (1995). Any Aspergillus sp. can be used in an expression system to practice this invention, including e.g., A. nidulans; A. fumigatus; A. niger or A. oryzae; the genome for A. niger CBS513.88, a parent of commercially used enzyme production strains, was recently sequenced (see, e.g., Nat Biotechnol. 2007 Feb;25(2):221-31). Similarly, the genomic sequencing of Aspergillus oryzae was recently completed (Nature. 2005 Dec. 22;438(7071):1157-61). For alternative fungal expression systems that can be used to practice this invention, e.g., to express enzymes for use in industrial applications, such as biofuel production, see e.g., Advances in Fungal Biotechnology for Industry, Agriculture, and Medicine. Edited by Jan S. Tkacz & Lene Lange. 2004. Kluwer Academic & Plenum Publishers, New York; and e.g., Handbook of Industrial Mycology. Edited by Zhiqiang An. 24 Sep. 2004. Mycology Series No. 22. Marcel Dekker, New York; and e.g., Talbot (2007) “Fungal genomics goes industrial”, Nature Biotechnology 25(5):542; and in U.S. Pat. Nos. 4,885,249; 5,866,406; and international patent publication WO/2003/012071.

[0256] The vector can be introduced into the host cells using any of a variety of techniques, including transformation, transfection, transduction, viral infection, gene guns, or Ti-mediated gene transfer. Particular methods include calcium phosphate transfection, DEAE-Dextran mediated transfection, lipofection, or electroporation (Davis, L., Dibner, M., Battey, I., Basic Methods in Molecular Biology, (1986)).

[0257] In one aspect, the nucleic acids or vectors of the invention are introduced into the cells for screening, thus, the nucleic acids enter the cells in a manner suitable for subsequent expression of the nucleic acid. The method of introduction is largely dictated by the targeted cell type. Exemplary methods include CaPO₄ precipitation, liposome fusion, lipofection (e.g., LIPOFECTIN™), electroporation, viral infection, etc. The candidate nucleic acids may stably integrate into the genome of the host cell (for example, with retroviral introduction) or may exist either transiently or stably in the cytoplasm (i.e. through the use of traditional plasmids, utilizing standard regulatory sequences, selection markers, etc.). As many pharmaceutically important screens require human or model mammalian cell targets, retroviral vectors capable of transfecting such targets can be used.

[0258] Where appropriate, the engineered host cells can be cultured in conventional nutrient media modified as appropriate for activating promoters, selecting transformants or amplifying the genes of the invention. Following transformation of a suitable host strain and growth of the host strain to an appropriate cell density, the selected promoter may be induced by appropriate means (e.g., temperature shift or chemical induction) and the cells may be cultured for an additional period to allow them to produce the desired polypeptide or fragment thereof.

[0259] Cells can be harvested by centrifugation, disrupted by physical or chemical means, and the resulting crude extract is retained for further purification. Microbial cells employed for expression of proteins can be disrupted by any convenient method, including freeze-thaw cycling, sonication, mechanical disruption, or use of cell lysing agents. Such methods are well known to those skilled in the art. The expressed polypeptide or fragment thereof can be recovered and purified from recombinant cell cultures by methods including ammonium sulfate or ethanol precipitation, acid extraction, anion or cation exchange chromatography, phosphocellulose chromatography, hydrophobic interaction chromatography, affinity chromatography, hydroxylapatite chromatography and lectin chromatography. Protein refolding steps can be used, as necessary, in completing configuration of the polypeptide. If desired, high performance liquid chromatography (HPLC) can be employed for final purification steps.

[0260] The constructs in host cells can be used in a conventional manner to produce the gene product encoded by the recombinant sequence. Depending upon the host employed in a recombinant production procedure, the polypeptides produced by host cells containing the vector may be glycosylated or may be non-glycosylated. Polypeptides of the invention may or may not also include an initial methionine amino acid residue.

[0261] Cell-free translation systems can also be employed to produce a polypeptide of the invention. Cell-free translation systems can use mRNAs transcribed from a DNA construct comprising a promoter operably linked to a nucleic acid encoding the polypeptide or fragment thereof. In some aspects, the DNA construct may be linearized prior to conducting an in vitro transcription reaction. The transcribed mRNA is then incubated with an appropriate cell-free translation extract, such as a rabbit reticulocyte extract, to produce the desired polypeptide or fragment thereof.

[0262] The expression vectors can contain one or more selectable marker genes to provide a phenotypic trait for selection of transformed host cells such as dihydrofolate reductase or neomycin resistance for eukaryotic cell culture, or such as tetracycline or ampicillin resistance in E. coli.

[0263] Host cells containing the polynucleotides of interest, e.g., nucleic acids of the invention, can be cultured in conventional nutrient media modified as appropriate for activating promoters, selecting transformants or amplifying genes. The culture conditions, such as temperature, pH and the like, are those previously used with the host cell selected for expression and will be apparent to the ordinarily skilled artisan. The clones which are identified as having the specified enzyme activity may then be sequenced to identify the polynucleotide sequence encoding an enzyme having the enhanced activity.

[0264] The invention provides a method for overexpressing a recombinant the lignocellulosic enzyme, e.g., glycosyl hydrolase, cellulase, endoglucanase, cellobiohydrolase, beta-glucosidase, xylanase, mannanse, β-xylosidase and/or arabinofuranosidase enzyme in a cell comprising expressing a vector comprising a nucleic acid of the invention, e.g., a nucleic acid comprising a nucleic acid sequence with at least about 50%, 51%, 52%, 53%, 54%, 55%, 56%, 57%, 58%, 59%, 60%, 61%, 62%, 63%, 64%, 65%, 66%, 67%, 68%, 69%, 70%, 71%, 72%, 73%, 74%, 75%, 76%, 77%, 78%, 79%, 80%, 81%, 82%, 83%, 84%, 85%, 86%, 87%, 88%, 89%, 90%, 91%, 92%, 93%, 94%, 95%, 96%, 97%, 98%, 99%, or more sequence identity to an exemplary sequence of the invention over a region of at least about 100 residues, wherein the sequence identities are determined by analysis with a sequence comparison algorithm or by visual inspection, or, a nucleic acid that hybridizes under stringent conditions to a nucleic acid sequence of the invention. The overexpression can be effected by any means, e.g., use of a high activity promoter, a dicistronic vector or by gene amplification of the vector.

[0265] The nucleic acids of the invention can be expressed, or overexpressed, in any in vitro or in vivo expression system. Any cell culture systems can be employed to express, or over-express, recombinant protein, including plant, bacterial, insect, yeast, fungal or mammalian cultures. Exemplary plant cell culture systems include those from rice, corn, tobacco (e.g., tobacco BY-2 cells) or any protoplast cell culture system, see, e.g., U.S. Pat. Nos. 7,045,354; 6,127,145; 5,693,506; 5,407,816.

[0266] Over-expression can be effected by appropriate choice of promoters, enhancers, vectors (e.g., use of replicon vectors, dicistronic vectors (see, e.g., Gurtu (1996) Biochem. Biophys. Res. Commun. 229:295-8), media, culture systems and the like. In one aspect, gene amplification using selection markers, e.g., glutamine synthetase (see, e.g., Sanders (1987) Dev. Biol. Stand. 66:55-63), in cell systems are used to overexpress the polypeptides of the invention. The host cell may be any of the host cells familiar to those skilled in the art, including prokaryotic cells, eukaryotic cells, mammalian cells, insect cells, or plant cells. The selection of an appropriate host is within the abilities of those skilled in the art.

[0267] The vector may be introduced into the host cells using any of a variety of techniques, including transformation, transfection, transduction, viral infection, gene guns, or Ti-mediated gene transfer. Particular methods include calcium phosphate transfection, DEAE-Dextran mediated transfection, lipofection, or electroporation (Davis, L., Dibner, M., Battey, I., Basic Methods in Molecular Biology, (1986)).

[0268] Where appropriate, the engineered host cells can be cultured in conventional nutrient media modified as appropriate for activating promoters, selecting transformants or amplifying the genes of the invention. Following transformation of a suitable host strain and growth of the host strain to an appropriate cell density, the selected promoter may be induced by appropriate means (e.g., temperature shift or chemical induction) and the cells may be cultured for an additional period to allow them to produce the desired polypeptide or fragment thereof.

[0269] Cells can be harvested by centrifugation, disrupted by physical or chemical means and the resulting crude extract is retained for further purification. Microbial cells employed for expression of proteins can be disrupted by any convenient method, including freeze-thaw cycling, sonication, mechanical disruption, or use of cell lysing agents. Such methods are well known to those skilled in the art. The expressed polypeptide or fragment thereof can be recovered and purified from recombinant cell cultures by methods including ammonium sulfate or ethanol precipitation, acid extraction, anion or cation exchange chromatography, phosphocellulose chromatography, hydrophobic interaction chromatography, affinity chromatography, hydroxylapatite chromatography and lectin chromatography. Protein refolding steps can be used, as necessary, in completing configuration of the polypeptide. If desired, high performance liquid chromatography (HPLC) can be employed for final purification steps.

[0270] Various mammalian cell culture systems can also be employed to express recombinant protein. Examples of mammalian expression systems include the COS-7 lines of monkey kidney fibroblasts (described by Gluzman, Cell, 23:175, 1981) and other cell lines capable of expressing proteins from a compatible vector, such as the C127, 3T3, CHO, HeLa and BHK cell lines.

[0271] The constructs in host cells can be used in a conventional manner to produce the gene product encoded by the recombinant sequence. Depending upon the host employed in a recombinant production procedure, the polypeptides produced by host cells containing the vector may be glycosylated or may be non-glycosylated. Polypeptides of the invention may or may not also include an initial methionine amino acid residue.

[0272] Alternatively, the polypeptides of the invention, or fragments comprising at least 5, 10, 15, 20, 25, 30, 35, 40, 50, 75, 100, or 150 or more consecutive amino acids thereof can be synthetically produced by conventional peptide synthesizers, e.g., as discussed below. In other aspects, fragments or portions of the polypeptides may be employed for producing the corresponding full-length polypeptide by peptide synthesis; therefore, the fragments may be employed as intermediates for producing the full-length polypeptides.

[0273] Cell-free translation systems can also be employed to produce one of the polypeptides of the invention, or fragments comprising at least 5, 10, 15, 20, 25, 30, 35, 40, 50, 75, 100, or 150 or more consecutive amino acids thereof using mRNAs transcribed from a DNA construct comprising a promoter operably linked to a nucleic acid encoding the polypeptide or fragment thereof. In some aspects, the DNA construct may be linearized prior to conducting an in vitro transcription reaction. The transcribed mRNA is then incubated with an appropriate cell-free translation extract, such as a rabbit reticulocyte extract, to produce the desired polypeptide or fragment thereof.

[0274] Amplification of Nucleic Acids

[0275] In practicing the invention, nucleic acids of the invention and nucleic acids encoding the lignocellulosic enzyme, e.g., glycosyl hydrolase, cellulase, endoglucanase, cellobiohydrolase, beta-glucosidase, xylanase, mannanse, β-xylosidase and/or arabinofuranosidase enzymes of the invention, or modified nucleic acids of the invention, can be reproduced by amplification, e.g., PCR. Amplification can also be used to clone or modify the nucleic acids of the invention. Thus, the invention provides amplification primer sequence pairs for amplifying nucleic acids of the invention. One of skill in the art can design amplification primer sequence pairs for any part of or the full length of these sequences.

[0276] In one aspect, the invention provides a nucleic acid amplified by an amplification primer pair of the invention, e.g., a primer pair as set forth by about the first (the 5′) 12, 13, 14, 15, 16, 17, 18, 19, 20, 21, 22, 23, 24, or 25 or more residues of a nucleic acid of the invention, and about the first (the 5′) 15, 16, 17, 18, 19, 20, 21, 22, 23, 24, or 25 or more residues of the complementary strand. The invention provides amplification primer sequence pairs for amplifying a nucleic acid encoding a polypeptide having a lignocellulosic activity, e.g., a glycosyl hydrolase, cellulase, endoglucanase, beta-glucosidase, xylanase, mannanse, β-xylosidase and/or arabinofuranosidase enzyme activity, wherein the primer pair is capable of amplifying a nucleic acid comprising a sequence of the invention, or fragments or subsequences thereof. One or each member of the amplification primer sequence pair can comprise an oligonucleotide comprising at least about 10 to 50 or more consecutive bases of the sequence, or about 12, 13, 14, 15, 16, 17, 18, 19, 20, 21, 22, 23, 24, or 25 or more consecutive bases of the sequence. The invention provides amplification primer pairs, wherein the primer pair comprises a first member having a sequence as set forth by about the first (the 5′) 12, 13, 14, 15, 16, 17, 18, 19, 20, 21, 22, 23, 24, or 25 or more residues of a nucleic acid of the invention, and a second member having a sequence as set forth by about the first (the 5′) 12, 13, 14, 15, 16, 17, 18, 19, 20, 21, 22, 23, 24, or 25 or more residues of the complementary strand of the first member.

[0277] The invention provides the lignocellulosic enzyme, e.g., glycosyl hydrolase, cellulase, endoglucanase, cellobiohydrolase, beta-glucosidase, xylanase, mannanse, β-xylosidase and/or arabinofuranosidase enzymes generated by amplification, e.g., polymerase chain reaction (PCR), using an amplification primer pair of the invention. The invention provides methods of making a lignocellulosic enzyme, e.g., a glycosyl hydrolase, cellulase, endoglucanase, cellobiohydrolase, beta-glucosidase, xylanase, mannanse, β-xylosidase and/or arabinofuranosidase enzyme by amplification, e.g., PCR, using an amplification primer pair of the invention. In one aspect, the amplification primer pair amplifies a nucleic acid from a library, e.g., a gene library, such as an environmental library.

[0278] Amplification reactions can also be used to quantify the amount of nucleic acid in a sample (such as the amount of message in a cell sample), label the nucleic acid (e.g., to apply it to an array or a blot), detect the nucleic acid, or quantify the amount of a specific nucleic acid in a sample. In one aspect of the invention, message isolated from a cell or a cDNA library are amplified.

[0279] The skilled artisan can select and design suitable oligonucleotide amplification primers. Amplification methods are also well known in the art, and include, e.g., polymerase chain reaction, PCR (see, e.g., PCR PROTOCOLS, A GUIDE TO METHODS AND APPLICATIONS, ed. Innis, Academic Press, N.Y. (1990) and PCR STRATEGIES (1995), ed. Innis, Academic Press, Inc., N.Y., ligase chain reaction (LCR) (see, e.g., Wu (1989) Genomics 4:560; Landegren (1988) Science 241:1077; Barringer (1990) Gene 89:117); transcription amplification (see, e.g., Kwoh (1989)

[0280] Proc. Natl. Acad. Sci. USA 86:1173); and, self-sustained sequence replication (see, e.g., Guatelli (1990) Proc. Natl. Acad. Sci. USA 87:1874); Q Beta replicase amplification (see, e.g., Smith (1997) J. Clin. Microbiol. 35:1477-1491), automated Q-beta replicase amplification assay (see, e.g., Burg (1996) Mol. Cell. Probes 10:257-271) and other RNA polymerase mediated techniques (e.g., NASBA, Cangene, Mississauga, Ontario); see also Berger (1987) Methods Enzymol. 152:307-316; Sambrook; Ausubel; U.S. Pat. Nos. 4,683,195 and 4,683,202; Sooknanan (1995) Biotechnology 13:563-564.

### Determining Sequence Identity in Nucleic Acids and Polypeptides

[0281] The invention provides nucleic acids comprising sequences having at least about 50%, 51%, 52%, 53%, 54%, 55%, 56%, 57%, 58%, 59%, 60%, 61%, 62%, 63%, 64%, 65%, 66%, 67%, 68%, 69%, 70%, 71%, 72%, 73%, 74%, 75%, 76%, 77%, 78%, 79%, 80%, 81%, 82%, 83%, 84%, 85%, 86%, 87%, 88%, 89%, 90%, 91%, 92%, 93%, 94%, 95%, 96%, 97%, 98%, 99%, or more, or complete (100%) sequence identity (homology) to an exemplary nucleic acid of the invention (see also Tables 1 to 3, and the Sequence Listing) over a region of at least about 50, 75, 100, 150, 200, 250, 300, 350, 400, 450, 500, 550, 600, 650, 700, 750, 800, 850, 900, 950, 1000, 1050, 1100, 1150, 1200, 1250, 1300, 1350, 1400, 1450, 1500, 1550 or more, residues. The invention provides polypeptides comprising sequences having at least about 50%, 51%, 52%, 53%, 54%, 55%, 56%, 57%, 58%, 59%, 60%, 61%, 62%, 63%, 64%, 65%, 66%, 67%, 68%, 69%, 70%, 71%, 72%, 73%, 74%, 75%, 76%, 77%, 78%, 79%, 80%, 81%, 82%, 83%, 84%, 85%, 86%, 87%, 88%, 89%, 90%, 91%, 92%, 93%, 94%, 95%, 96%, 97%, 98%, 99%, or more, or complete (100%) sequence identity to an exemplary polypeptide of the invention (see also Tables 1 to 3, and the Sequence Listing). The extent of sequence identity (homology) may be determined using any computer program and associated parameters, including those described herein, e.g., BLASTP or BLASTN, BLAST 2.2.2. or FASTA version 3.0t78, with the default parameters.

[0282] Nucleic acid sequences of the invention can comprise at least 10, 15, 20, 25, 30, 35, 40, 50, 75, 100, 150, 200, 300, 400, or 500 or more consecutive nucleotides of an exemplary sequence of the invention and sequences substantially identical thereto. Homologous sequences and fragments of nucleic acid sequences of the invention can refer to a sequence having at least about 50%, 51%, 52%, 53%, 54%, 55%, 56%, 57%, 58%, 59%, 60%, 61%, 62%, 63%, 64%, 65%, 66%, 67%, 68%, 69%, 70%, 71%, 72%, 73%, 74%, 75%, 76%, 77%, 78%, 79%, 80%, 81%, 82%, 83%, 84%, 85%, 86%, 87%, 88%, 89%, 90%, 91%, 92%, 93%, 94%, 95%, 96%, 97%, 98%, 99%, or more sequence identity (homology) to these sequences. Homology (sequence identity) may be determined using any of the computer programs and parameters described herein, including BLASTP or BLASTN, BLAST 2.2.2., FASTA version 3.0t78, which in alternative aspects, can use default parameters. Homologous sequences also include RNA sequences in which uridines replace the thymines in the nucleic acid sequences of the invention. The homologous sequences may be obtained using any of the procedures described herein or may result from the correction of a sequencing error. It will be appreciated that the nucleic acid sequences of the invention can be represented in the traditional single character format (See the inside back cover of Stryer, Lubert. Biochemistry, 3rd Ed., W. H Freeman & Co., New York.) or in any other format which records the identity of the nucleotides in a sequence.

[0283] In various aspects, sequence comparison (sequence identity determination) programs identified herein are used in this aspect of the invention, i.e., to determine if a nucleic acid or polypeptide sequence is within the scope of the invention. However, protein and/or nucleic acid sequence identities (homologies) may be evaluated using any sequence comparison algorithm or program known in the art. Such algorithms and programs include, but are by no means limited to, TBLASTN, BLASTP, FASTA, TFASTA and CLUSTALW (see, e.g., Pearson and Lipman, Proc. Natl. Acad. Sci. USA 85(8):2444-2448, 1988; Altschul et al., J. Mol. Biol. 215(3):403-410, 1990; Thompson Nucleic Acids Res. 22(2):4673-4680, 1994; Higgins et al., Methods Enzymol. 266:383-402, 1996; Altschul et al., J. Mol. Biol. 215(3):403-410, 1990; Altschul et al., Nature Genetics 3:266-272, 1993).

[0284] In one aspect, homology or sequence identity is measured using sequence analysis software (e.g., Sequence Analysis Software Package of the Genetics Computer Group, University of Wisconsin Biotechnology Center, 1710 University Avenue, Madison, Wis. 53705). Such software matches similar sequences by assigning degrees of homology or sequence identity to various deletions, substitutions and other modifications. In one aspect, the terms “homology” and “identity” in the context of two or more nucleic acids or polypeptide sequences, refer to two or more sequences or subsequences that are the same or have a specified percentage of amino acid residues or nucleotides that are the same when compared and aligned for maximum correspondence over a comparison window or designated region as measured using any number of sequence comparison algorithms or by manual alignment and visual inspection. In one aspect, for sequence comparison, one sequence acts as a reference sequence, to which test sequences are compared. When using a sequence comparison algorithm, test and reference sequences are entered into a computer, subsequence coordinates are designated, if necessary and sequence algorithm program parameters are designated. Default program parameters can be used, or alternative parameters can be designated. The sequence comparison algorithm then calculates the percent sequence identities for the test sequences relative to the reference sequence, based on the program parameters.

[0285] A “comparison window”, as used herein, includes reference to a segment of any one of the number of contiguous positions selected from the group consisting of from 20 to 600, usually about 50 to about 200, more usually about 100 to about 150 in which a sequence may be compared to a reference sequence of the same number of contiguous positions after the two sequences are optimally aligned. Methods of alignment of sequence for comparison are well-known in the art. Optimal alignment of sequences for comparison can be conducted, e.g., by the local homology algorithm of Smith & Waterman, Adv. Appl. Math. 2:482, 1981, by the homology or sequence identity alignment algorithm of Needleman & Wunsch, J. Mol. Biol 48:443, 1970, by the search for similarity method of person & Lipman, Proc. Nat'l. Acad. Sci. USA 85:2444, 1988, by computerized implementations of these algorithms (GAP, BESTFIT, FASTA and TFASTA in the Wisconsin Genetics Software Package, Genetics Computer Group, 575 Science Dr., Madison, Wis.), or by manual alignment and visual inspection. Other algorithms for determining homology or sequence identity include, for example, in addition to a BLAST program (Basic Local Alignment Search Tool at the National Center for Biological Information), ALIGN, AMAS (Analysis of Multiply Aligned Sequences), AMPS (Protein Multiple Sequence Alignment), ASSET (Aligned Segment Statistical Evaluation Tool), BANDS, BESTSCOR, BIOSCAN (Biological Sequence Comparative Analysis Node), BLIMPS (BLocks IMProved Searcher), FASTA, Intervals & Points, BMB, CLUSTAL V, CLUSTAL W, CONSENSUS, LCONSENSUS, WCONSENSUS, Smith-Waterman algorithm, DARWIN, Las Vegas algorithm, FNAT (Forced Nucleotide Alignment Tool), Framealign, Framesearch, DYNAMIC, FILTER, FSAP (Fristensky Sequence Analysis Package), GAP (Global Alignment Program), GENAL, GIBBS, GenQuest, ISSC (Sensitive Sequence Comparison), LALIGN (Local Sequence Alignment), LCP (Local Content Program), MACAW (Multiple Alignment Construction & Analysis Workbench), MAP (Multiple Alignment Program), MBLKP, MBLKN, PIMA (Pattern-Induced Multi-sequence Alignment), SAGA (Sequence Alignment by Genetic Algorithm) and WHAT-IF. Such alignment programs can also be used to screen genome databases to identify polynucleotide sequences having substantially identical sequences. A number of genome databases are available, for example, a substantial portion of the human genome is available as part of the Human Genome Sequencing Project (Gibbs, 1995). At least twenty-one other genomes have already been sequenced, including, for example, M. genitalium (Fraser et al., 1995), M. jannaschii (Bult et al., 1996), H. influenzae (Fleischmann et al., 1995), E. coli (Blattner et al., 1997) and yeast (S. cerevisiae) (Mewes et al., 1997) and D. melanogaster (Adams et al., 2000). Significant progress has also been made in sequencing the genomes of model organism, such as mouse, C. elegans and Arabadopsis sp. Several databases containing genomic information annotated with some functional information are maintained by different organizations and may be accessible via the internet.

[0286] In one aspect, BLAST and BLAST 2.0 algorithms are used, which are described in, e.g., Altschul et al., Nuc. Acids Res. 25:3389-3402, 1977 and Altschul et al., J. Mol. Biol. 215:403-410, 1990, respectively. Software for performing BLAST analyses is publicly available through the National Center for Biotechnology Information. This algorithm involves first identifying high scoring sequence pairs (HSPs) by identifying short words of length W in the query sequence, which either match or satisfy some positive-valued threshold score T when aligned with a word of the same length in a database sequence. T is referred to as the neighborhood word score threshold (Altschul et al., supra). These initial neighborhood word hits act as seeds for initiating searches to find longer HSPs containing them. The word hits are extended in both directions along each sequence for as far as the cumulative alignment score can be increased. Cumulative scores are calculated using, for nucleotide sequences, the parameters M (reward score for a pair of matching residues; always >0). For amino acid sequences, a scoring matrix is used to calculate the cumulative score. Extension of the word hits in each direction are halted when: the cumulative alignment score falls off by the quantity X from its maximum achieved value; the cumulative score goes to zero or below, due to the accumulation of one or more negative-scoring residue alignments; or the end of is either sequence is reached. The BLAST algorithm parameters W, T and X determine the sensitivity and speed of the alignment. The BLASTN program (for nucleotide sequences) uses as defaults a wordlength (W) of 11, an expectation (E) of 10, M=5, N=−4 and a comparison of both strands. For amino acid sequences, the BLASTP program uses as defaults a wordlength of 3 and expectations (E) of 10 and the BLOSUM62 scoring matrix (see Henikoff & Henikoff, Proc. Natl. Acad. Sci. USA 89:10915, 1989) alignments (B) of 50, expectation (E) of 10, M=5, N=−4 and a comparison of both strands.

[0287] The BLAST algorithm can also be used to perform a statistical analysis of the similarity between two sequences (see, e.g., Karlin & Altschul, Proc. Natl. Acad. Sci. USA 90:5873, 1993). One measure of similarity provided by BLAST algorithm is the smallest sum probability (P(N)), which provides an indication of the probability by which a match between two nucleotide or amino acid sequences would occur by chance. For example, a nucleic acid is considered similar to a references sequence if the smallest sum probability in a comparison of the test nucleic acid to the reference nucleic acid is less than about 0.2, more in one aspect less than about 0.01 and most in one aspect less than about 0.001.

[0288] In one aspect, protein and nucleic acid sequence homologies (or sequence identities) are evaluated using the Basic Local Alignment Search Tool (“BLAST”) In particular, five specific BLAST programs are used to perform the following task:
[0289] (1) BLASTP and BLAST3 compare an amino acid query sequence against a protein sequence database;
[0290] (2) BLASTN compares a nucleotide query sequence against a nucleotide sequence database;
[0291] (3) BLASTX compares the six-frame conceptual translation products of a query nucleotide sequence (both strands) against a protein sequence database;
[0292] (4) TBLASTN compares a query protein sequence against a nucleotide sequence database translated in all six reading frames (both strands); and
[0293] (5) TBLASTX compares the six-frame translations of a nucleotide query sequence against the six-frame translations of a nucleotide sequence database.

[0294] The BLAST programs identify homologous sequences by identifying similar segments, which are referred to herein as “high-scoring segment pairs,” between a query amino or nucleic acid sequence and a test sequence which is in one aspect obtained from a protein or nucleic acid sequence database. High-scoring segment pairs are in one aspect identified (i.e., aligned) by means of a scoring matrix, many of which are known in the art. In one aspect, the scoring matrix used is the BLOSUM62 matrix (Gonnet (1992) Science 256:1443-1445; Henikoff and Henikoff (1993) Proteins 17:49-61). Less in one aspect, the PAM or PAM250 matrices may also be used (see, e.g., Schwartz and Dayhoff, eds., 1978, Matrices for Detecting Distance Relationships: Atlas of Protein Sequence and Structure, Washington: National Biomedical Research Foundation). BLAST programs are accessible through the U.S. National Library of Medicine.

[0295] The parameters used with the above algorithms may be adapted depending on the sequence length and degree of homology studied. In some aspects, the parameters may be the default parameters used by the algorithms in the absence of instructions from the user.

### Computer Systems and Computer Program Products

[0296] The invention provides computers, computer systems, computer readable mediums, computer programs products and the like recorded or stored thereon the nucleic acid and polypeptide sequences of the invention. Additionally, in practicing the methods of the invention, e.g., to determine and identify sequence identities (to determine whether a nucleic acid is within the scope of the invention), structural homologies, motifs and the like in silico, a nucleic acid or polypeptide sequence of the invention can be stored, recorded, and manipulated on any medium which can be read and accessed by a computer.

[0297] As used herein, the words “recorded” and “stored” refer to a process for storing information on a computer medium. A skilled artisan can readily adopt any known methods for recording information on a computer readable medium to generate manufactures comprising one or more of the nucleic acid and/or polypeptide sequences of the invention. As used herein, the terms “computer,” “computer program” and “processor” are used in their broadest general contexts and incorporate all such devices, as described in detail, below. A “coding sequence of or a “sequence encodes” a particular polypeptide or protein, is a nucleic acid sequence which is transcribed and translated into a polypeptide or protein when placed under the control of appropriate regulatory sequences.

[0298] The polypeptides of the invention include exemplary sequences of the invention and sequences substantially identical thereto, and subsequences (fragments) of any of the preceding sequences. In one aspect, substantially identical, or homologous, polypeptide sequences refer to a polypeptide sequence having at least 50%, 51%, 52%, 53%, 54%, 55%, 56%, 57%, 58%, 59%, 60%, 61%, 62%, 63%, 64%, 65%, 66%, 67%, 68%, 69%, 70%, 71%, 72%, 73%, 74%, 75%, 76%, 77%, 78%, 79%, 80%, 81%, 82%, 83%, 84%, 85%, 86%, 87%, 88%, 89%, 90%, 91%, 92%, 93%, 94%, 95%, 96%, 97%, 98%, 99%, or more, or complete (100%) sequence identity (homology) to an exemplary sequence of the invention (see also Tables 1 to 3).

[0299] Homology (sequence identity) may be determined using any of the computer programs and parameters described herein. A nucleic acid or polypeptide sequence of the invention can be stored, recorded and manipulated on any medium which can be read and accessed by a computer. As used herein, the words “recorded” and “stored” refer to a process for storing information on a computer medium. A skilled artisan can readily adopt any of the presently known methods for recording information on a computer readable medium to generate manufactures comprising one or more of the nucleic acid sequences of the invention, one or more of the polypeptide sequences of the invention. Another aspect of the invention is a computer readable medium having recorded thereon at least 2, 5, 10, 15, or 20 or more nucleic acid or polypeptide sequences of the invention.

[0300] Another aspect of the invention is a computer readable medium having recorded thereon one or more of the nucleic acid sequences of the invention. Another aspect of the invention is a computer readable medium having recorded thereon one or more of the polypeptide sequences of the invention. Another aspect of the invention is a computer readable medium having recorded thereon at least 2, 5, 10, 15, or 20 or more of the nucleic acid or polypeptide sequences as set forth above.

[0301] Computer readable media include magnetically readable media, optically readable media, electronically readable media and magnetic/optical media. For example, the computer readable media may be a hard disk, a floppy disk, a magnetic tape, CD-ROM, Digital Versatile Disk (DVD), Random Access Memory (RAM), or Read Only Memory (ROM) as well as other types of other media known to those skilled in the art.

[0302] Aspects of the invention include systems (e.g., internet based systems), e.g., computer systems which store and manipulate the sequence information described herein. One example of a computer system 100 is illustrated in block diagram form in FIG. 1. As used herein, “a computer system” refers to the hardware components, software components and data storage components used to analyze a nucleotide sequence of a nucleic acid sequence of the invention, or a polypeptide sequence of the invention. In one aspect, the computer system 100 includes a processor for processing, accessing and manipulating the sequence data. The processor 105 can be any well-known type of central processing unit, such as, for example, the Pentium III from Intel Corporation, or similar processor from Sun, Motorola, Compaq, AMD or International Business Machines.

[0303] In one aspect, the computer system 100 is a general purpose system that comprises the processor 105 and one or more internal data storage components 110 for storing data and one or more data retrieving devices for retrieving the data stored on the data storage components. A skilled artisan can readily appreciate that any one of the currently available computer systems are suitable.

[0304] In one particular aspect, the computer system 100 includes a processor 105 connected to a bus which is connected to a main memory 115 (in one aspect implemented as RAM) and one or more internal data storage devices 110, such as a hard drive and/or other computer readable media having data recorded thereon. In some aspects, the computer system 100 further includes one or more data retrieving device 118 for reading the data stored on the internal data storage devices 110.

[0305] The data retrieving device 118 may represent, for example, a floppy disk drive, a compact disk drive, a magnetic tape drive, or a modem capable of connection to a remote data storage system (e.g., via the internet) etc. In some aspects, the internal data storage device 110 is a removable computer readable medium such as a floppy disk, a compact disk, a magnetic tape, etc. containing control logic and/or data recorded thereon. The computer system 100 may advantageously include or be programmed by appropriate software for reading the control logic and/or the data from the data storage component once inserted in the data retrieving device.

[0306] The computer system 100 includes a display 120 which is used to display output to a computer user. It should also be noted that the computer system 100 can be linked to other computer systems 125a-c in a network or wide area network to provide centralized access to the computer system 100.

[0307] Software for accessing and processing the nucleotide sequences of a nucleic acid sequence of the invention, or a polypeptide sequence of the invention, (such as search tools, compare tools and modeling tools etc.) may reside in main memory 115 during execution.

[0308] In some aspects, the computer system 100 may further comprise a sequence comparison algorithm for comparing a nucleic acid sequence of the invention, or a polypeptide sequence of the invention, stored on a computer readable medium to a reference nucleotide or polypeptide sequence(s) stored on a computer readable medium. A “sequence comparison algorithm” refers to one or more programs which are implemented (locally or remotely) on the computer system 100 to compare a nucleotide sequence with other nucleotide sequences and/or compounds stored within a data storage means. For example, the sequence comparison algorithm may compare the nucleotide sequences of a nucleic acid sequence of the invention, or a polypeptide sequence of the invention, stored on a computer readable medium to reference sequences stored on a computer readable medium to identify homologies or structural motifs.

[0309] FIG. 2 is a flow diagram illustrating one aspect of a process 200 for comparing a new nucleotide or protein sequence with a database of sequences in order to determine the homology levels between the new sequence and the sequences in the database. The database of sequences can be a private database stored within the computer system 100, or a public database such as GENBANK that is available through the Internet.

[0310] The process 200 begins at a start state 201 and then moves to a state 202 wherein the new sequence to be compared is stored to a memory in a computer system 100. As discussed above, the memory could be any type of memory, including RAM or an internal storage device.

[0311] The process 200 then moves to a state 204 wherein a database of sequences is opened for analysis and comparison. The process 200 then moves to a state 206 wherein the first sequence stored in the database is read into a memory on the computer. A comparison is then performed at a state 210 to determine if the first sequence is the same as the second sequence. It is important to note that this step is not limited to performing an exact comparison between the new sequence and the first sequence in the database. Well-known methods are known to those of skill in the art for comparing two nucleotide or protein sequences, even if they are not identical. For example, gaps can be introduced into one sequence in order to raise the homology level between the two tested sequences. The parameters that control whether gaps or other features are introduced into a sequence during comparison are normally entered by the user of the computer system.

[0312] Once a comparison of the two sequences has been performed at the state 210, a determination is made at a decision state 210 whether the two sequences are the same. Of course, the term “same” is not limited to sequences that are absolutely identical. Sequences that are within the homology parameters entered by the user will be marked as “same” in the process 200.

[0313] If a determination is made that the two sequences are the same, the process 200 moves to a state 214 wherein the name of the sequence from the database is displayed to the user. This state notifies the user that the sequence with the displayed name fulfills the homology constraints that were entered. Once the name of the stored sequence is displayed to the user, the process 200 moves to a decision state 218 wherein a determination is made whether more sequences exist in the database. If no more sequences exist in the database, then the process 200 terminates at an end state 220. However, if more sequences do exist in the database, then the process 200 moves to a state 224 wherein a pointer is moved to the next sequence in the database so that it can be compared to the new sequence. In this manner, the new sequence is aligned and compared with every sequence in the database.

[0314] It should be noted that if a determination had been made at the decision state 212 that the sequences were not homologous, then the process 200 would move immediately to the decision state 218 in order to determine if any other sequences were available in the database for comparison.

[0315] Accordingly, one aspect of the invention is a computer system comprising a processor, a data storage device having stored thereon a nucleic acid sequence of the invention, or a polypeptide sequence of the invention, a data storage device having retrievably stored thereon reference nucleotide sequences or polypeptide sequences to be compared to a nucleic acid sequence of the invention, or a polypeptide sequence of the invention and a sequence comparer for conducting the comparison. The sequence comparer may indicate a homology level between the sequences compared or identify structural motifs in the above described nucleic acid code a nucleic acid sequence of the invention, or a polypeptide sequence of the invention, or it may identify structural motifs in sequences which are compared to these nucleic acid codes and polypeptide codes. In some aspects, the data storage device may have stored thereon the sequences of at least 2, 5, 10, 15, 20, 25, 30 or 40 or more of the nucleic acid sequences of the invention, or the polypeptide sequences of the invention.

[0316] Another aspect of the invention is a method for determining the level of homology between a nucleic acid sequence of the invention, or a polypeptide sequence of the invention and a reference nucleotide sequence. The method including reading the nucleic acid code or the polypeptide code and the reference nucleotide or polypeptide sequence through the use of a computer program which determines homology levels and determining homology between the nucleic acid code or polypeptide code and the reference nucleotide or polypeptide sequence with the computer program. The computer program may be any of a number of computer programs for determining homology levels, including those specifically enumerated herein, (e.g., BLAST2N with the default parameters or with any modified parameters). The method may be implemented using the computer systems described above. The method may also be performed by reading at least 2, 5, 10, 15, 20, 25, 30 or 40 or more of the above described nucleic acid sequences of the invention, or the polypeptide sequences of the invention through use of the computer program and determining homology between the nucleic acid codes or polypeptide codes and reference nucleotide sequences or polypeptide sequences.

[0317] FIG. 3 is a flow diagram illustrating one aspect of a process 250 in a computer for determining whether two sequences are homologous. The process 250 begins at a start state 252 and then moves to a state 254 wherein a first sequence to be compared is stored to a memory. The second sequence to be compared is then stored to a memory at a state 256. The process 250 then moves to a state 260 wherein the first character in the first sequence is read and then to a state 262 wherein the first character of the second sequence is read. It should be understood that if the sequence is a nucleotide sequence, then the character would normally be either A, T, C, G or U. If the sequence is a protein sequence, then it is in one aspect in the single letter amino acid code so that the first and sequence sequences can be easily compared.

[0318] A determination is then made at a decision state 264 whether the two characters are the same. If they are the same, then the process 250 moves to a state 268 wherein the next characters in the first and second sequences are read. A determination is then made whether the next characters are the same. If they are, then the process 250 continues this loop until two characters are not the same. If a determination is made that the next two characters are not the same, the process 250 moves to a decision state 274 to determine whether there are any more characters either sequence to read.

[0319] If there are not any more characters to read, then the process 250 moves to a state 276 wherein the level of homology between the first and second sequences is displayed to the user. The level of homology is determined by calculating the proportion of characters between the sequences that were the same out of the total number of sequences in the first sequence. Thus, if every character in a first 100 nucleotide sequence aligned with a every character in a second sequence, the homology level would be 100%.

[0320] Alternatively, the computer program may be a computer program which compares the nucleotide sequences of a nucleic acid sequence as set forth in the invention, to one or more reference nucleotide sequences in order to determine whether the nucleic acid code of the invention, differs from a reference nucleic acid sequence at one or more positions. Optionally such a program records the length and identity of inserted, deleted or substituted nucleotides with respect to the sequence of either the reference polynucleotide or a nucleic acid sequence of the invention. In one aspect, the computer program may be a program which determines whether a nucleic acid sequence of the invention, contains a single nucleotide polymorphism (SNP) with respect to a reference nucleotide sequence.

[0321] Accordingly, another aspect of the invention is a method for determining whether a nucleic acid sequence of the invention, differs at one or more nucleotides from a reference nucleotide sequence comprising the steps of reading the nucleic acid code and the reference nucleotide sequence through use of a computer program which identifies differences between nucleic acid sequences and identifying differences between the nucleic acid code and the reference nucleotide sequence with the computer program. In some aspects, the computer program is a program which identifies single nucleotide polymorphisms. The method may be implemented by the computer systems described above and the method illustrated in FIG. 3. The method may also be performed by reading at least 2, 5, 10, 15, 20, 25, 30, or 40 or more of the nucleic acid sequences of the invention and the reference nucleotide sequences through the use of the computer program and identifying differences between the nucleic acid codes and the reference nucleotide sequences with the computer program.

[0322] In other aspects the computer based system may further comprise an identifier for identifying features within a nucleic acid sequence of the invention or a polypeptide sequence of the invention. An “identifier” refers to one or more programs which identifies certain features within a nucleic acid sequence of the invention, or a polypeptide sequence of the invention. In one aspect, the identifier may comprise a program which identifies an open reading frame in a nucleic acid sequence of the to invention.

[0323] FIG. 4 is a flow diagram illustrating one aspect of an identifier process 300 for detecting the presence of a feature in a sequence. The process 300 begins at a start state 302 and then moves to a state 304 wherein a first sequence that is to be checked for features is stored to a memory 115 in the computer system 100. The process 300 then moves to a state 306 wherein a database of sequence features is opened. Such a database would include a list of each feature's attributes along with the name of the feature. For example, a feature name could be “Initiation Codon” and the attribute would be “ATG”. Another example would be the feature name “TAATAA Box” and the feature attribute would be “TAATAA”. An example of such a database is produced by the University of Wisconsin Genetics Computer Group. Alternatively, the features may be structural polypeptide motifs such as alpha helices, beta sheets, or functional polypeptide motifs such as enzymatic active sites, helix-turn-helix motifs or other motifs known to those skilled in the art.

[0324] Once the database of features is opened at the state 306, the process 300 moves to a state 308 wherein the first feature is read from the database. A comparison of the attribute of the first feature with the first sequence is then made at a state 310. A determination is then made at a decision state 316 whether the attribute of the feature was found in the first sequence. If the attribute was found, then the process 300 moves to a state 318 wherein the name of the found feature is displayed to the user.

[0325] The process 300 then moves to a decision state 320 wherein a determination is made whether move features exist in the database. If no more features do exist, then the process 300 terminates at an end state 324. However, if more features do exist in the database, then the process 300 reads the next sequence feature at a state 326 and loops back to the state 310 wherein the attribute of the next feature is compared against the first sequence. It should be noted, that if the feature attribute is not found in the first sequence at the decision state 316, the process 300 moves directly to the decision state 320 in order to determine if any more features exist in the database.

[0326] Accordingly, another aspect of the invention is a method of identifying a feature within a nucleic acid sequence of the invention, or a polypeptide sequence of the invention, comprising reading the nucleic acid code(s) or polypeptide code(s) through the use of a computer program which identifies features therein and identifying features within the nucleic acid code(s) with the computer program. In one aspect, computer program comprises a computer program which identifies open reading frames. The method may be performed by reading a single sequence or at least 2, 5, 10, 15, 20, 25, 30, or 40 or more of the nucleic acid sequences of the invention, or the polypeptide sequences of the invention, through the use of the computer program and identifying features within the nucleic acid codes or polypeptide codes with the computer program.

[0327] A nucleic acid sequence of the invention, or a polypeptide sequence of the invention, may be stored and manipulated in a variety of data processor programs in a variety of formats. For example, a nucleic acid sequence of the invention, or a polypeptide sequence of the invention, may be stored as text in a word processing file, such as Microsoft WORD™ or WORDPERFECT™ or as an ASCII file in a variety of database programs familiar to those of skill in the art, such as DB2™, SYBASE™, or ORACLE™. In addition, many computer programs and databases may be used as sequence comparison algorithms, identifiers, or sources of reference nucleotide sequences or polypeptide sequences to be compared to a nucleic acid sequence of the invention, or a polypeptide sequence of the invention. The following list is intended not to limit the invention but to provide guidance to programs and databases which are useful with the nucleic acid sequences of the invention, or the polypeptide sequences of the invention.

[0328] The programs and databases which may be used include, but are not limited to: MACPATTERN™ (EMBL), DISCOVERYBASE™ (Molecular Applications Group), GENEMINE™ (Molecular Applications Group), LOOK™ (Molecular Applications Group), MACLOOK™ (Molecular Applications Group), BLAST and BLAST2 (NCBI), BLASTN and BLASTX (Altschul et al, J. Mol. Biol. 215: 403, 1990), FASTA (Pearson and Lipman, Proc. Natl. Acad. Sci. USA, 85: 2444, 1988), FASTDB (Brutlag et al. Comp. App. Biosci. 6:237-245, 1990), CATALYST™ (Molecular Simulations Inc.), Catalyst/SHAPE™ (Molecular Simulations Inc.), Cerius².DBAccess™ (Molecular Simulations Inc.), HYPOGEN™ (Molecular Simulations Inc.), INSIGHT II™, (Molecular Simulations Inc.), DISCOVER™ (Molecular Simulations Inc.), CHARMm™ (Molecular Simulations Inc.), FELIX™ (Molecular Simulations Inc.), DELPHI™, (Molecular Simulations Inc.), QuanteMM™, (Molecular Simulations Inc.), Homology (Molecular Simulations Inc.), MODELER™ (Molecular Simulations Inc.), ISIS™ (Molecular Simulations Inc.), Quanta/Protein Design (Molecular Simulations Inc.), WebLab (Molecular Simulations Inc.), WebLab Diversity Explorer (Molecular Simulations Inc.), Gene Explorer (Molecular Simulations Inc.), SeqFold (Molecular Simulations Inc.), the MDL Available Chemicals Directory database, the MDL Drug Data Report data base, the Comprehensive Medicinal Chemistry database, Derwents's World Drug Index database, the BioByteMasterFile database, the Genbank database and the Genseqn database. Many other programs and data bases would be apparent to one of skill in the art given the present disclosure.

[0329] Motifs which may be detected using the above programs include sequences encoding leucine zippers, helix-turn-helix motifs, glycosylation sites, ubiquitination sites, alpha helices and beta sheets, signal sequences encoding signal peptides which direct the secretion of the encoded proteins, sequences implicated in transcription regulation such as homeoboxes, acidic stretches, enzymatic active sites, substrate binding sites and enzymatic cleavage sites.

### Hybridization of Nucleic Acids

[0330] The invention provides isolated, synthetic or recombinant nucleic acids that hybridize under stringent conditions to an exemplary sequence of the invention (e.g., SEQ ID NO:1, SEQ ID NO:3, etc. to SEQ ID NO:471, SEQ ID NO:480, SEQ ID NO:481, SEQ ID NO:482, SEQ ID NO:483, SEQ ID NO:484, SEQ ID NO:485, SEQ ID NO:486, SEQ ID NO:487, SEQ ID NO:488, all the odd numbered SEQ ID NOs: between SEQ ID NO:489 and SEQ ID NO:700, SEQ ID NO:707, SEQ ID NO:708, SEQ ID NO:709, SEQ ID NO:710, SEQ ID NO:711, SEQ ID NO:712, SEQ ID NO:713, SEQ ID NO:714, SEQ ID NO:715, SEQ ID NO:716, SEQ ID NO:717, SEQ ID NO:718, and/or SEQ ID NO:720; see also Tables 1 to 3, and the Sequence Listing). The stringent conditions can be highly stringent conditions, medium stringent conditions and/or low stringent conditions, including the high and reduced stringency conditions described herein. In one aspect, it is the stringency of the wash conditions that set forth the conditions which determine whether a nucleic acid is within the scope of the invention, as discussed below.

[0331] “Hybridization” refers to the process by which a nucleic acid strand joins with a complementary strand through base pairing. Hybridization reactions can be sensitive and selective so that a particular sequence of interest can be identified even in samples in which it is present at low concentrations. Suitably stringent conditions can be defined by, for example, the concentrations of salt or formamide in the prehybridization and hybridization solutions, or by the hybridization temperature and are well known in the art. In alternative aspects, stringency can be increased by reducing the concentration of salt, increasing the concentration of formamide, or raising the hybridization temperature. In alternative aspects, nucleic acids of the invention are defined by their ability to hybridize under various stringency conditions (e.g., high, medium, and low), as set forth herein.

[0332] In one aspect, hybridization under high stringency conditions comprise about 50% formamide at about 37° C. to 42° C. In one aspect, hybridization conditions comprise reduced stringency conditions in about 35% to 25% formamide at about 30° C. to 35° C. In one aspect, hybridization conditions comprise high stringency conditions, e.g., at 42° C. in 50% formamide, 5×SSPE, 0.3% SDS and 200 ug/ml sheared and denatured salmon sperm DNA. In one aspect, hybridization conditions comprise these reduced stringency conditions, but in 35% formamide at a reduced temperature of 35° C. The temperature range corresponding to a particular level of stringency can be further narrowed by calculating the purine to pyrimidine ratio of the nucleic acid of interest and adjusting the temperature accordingly. Variations on the above ranges and conditions are well known in the art.

[0333] In alternative aspects, nucleic acids of the invention as defined by their ability to hybridize under stringent conditions can be between about five residues and the full length of nucleic acid of the invention; e.g., they can be at least 5, 10, 15, 20, 25, 30, 35, 40, 50, 55, 60, 65, 70, 75, 80, 90, 100, 150, 200, 250, 300, 350, 400, 450, 500, 550, 600, 650, 700, 750, 800, 850, 900, 950, 1000, or more, residues in length. Nucleic acids shorter than full length are also included. These nucleic acids can be useful as, e.g., hybridization probes, labeling probes, PCR oligonucleotide probes, siRNA or miRNA (single or double stranded), antisense or sequences encoding antibody binding peptides (epitopes), motifs, active sites and the like.

[0334] In one aspect, nucleic acids of the invention are defined by their ability to hybridize under high stringency comprises conditions of about 50% formamide at about 37° C. to 42° C. In one aspect, nucleic acids of the invention are defined by their ability to hybridize under reduced stringency comprising conditions in about 35% to 25% formamide at about 30° C. to 35° C.

[0335] Alternatively, nucleic acids of the invention are defined by their ability to hybridize under high stringency comprising conditions at 42° C. in 50% formamide, 5×SSPE, 0.3% SDS, and a repetitive sequence blocking nucleic acid, such as cot-1 or salmon sperm DNA (e.g., 200 ug/ml sheared and denatured salmon sperm DNA). In one aspect, nucleic acids of the invention are defined by their ability to hybridize under reduced stringency conditions comprising 35% or 40% formamide at a reduced temperature of 35° C. or 42° C.

[0336] In nucleic acid hybridization reactions, the conditions used to achieve a particular level of stringency will vary, depending on the nature of the nucleic acids being hybridized. For example, the length, degree of complementarity, nucleotide sequence composition (e.g., GC v. AT content) and nucleic acid type (e.g., RNA v. DNA) of the hybridizing regions of the nucleic acids can be considered in selecting hybridization conditions. An additional consideration is whether one of the nucleic acids is immobilized, for example, on a filter.

[0337] Hybridization may be carried out under conditions of low stringency, moderate stringency or high stringency. As an example of nucleic acid hybridization, a polymer membrane containing immobilized denatured nucleic acids is first prehybridized for 30 minutes at 45° C. in a solution consisting of 0.9 M NaCl, 50 mM NaH₂PO₄, pH 7.0, 5.0 mM Na₂EDTA, 0.5% SDS, 10× Denhardt's and 0.5 mg/ml polyriboadenylic acid. Approximately 2×10⁷ cpm (specific activity 4-9×10⁸ cpm/ug) of ³²P end-labeled oligonucleotide probe are then added to the solution. After 12-16 hours of incubation, the membrane is washed for 30 minutes at room temperature in 1× SET (150 mM NaCl, 20 mM Tris hydrochloride, pH 7.8, 1 mM Na₂EDTA) containing 0.5% SDS, followed by a 30 minute wash in fresh 1× SET at Tₘ−10° C. for the oligonucleotide probe. The membrane is then exposed to auto-radiographic film for detection of hybridization signals. All of the foregoing hybridizations would be considered to be under conditions of high stringency.

[0338] Following hybridization, a filter can be washed to remove any non-specifically bound detectable probe. The stringency used to wash the filters can also be varied depending on the nature of the nucleic acids being hybridized, the length of the nucleic acids being hybridized, the degree of complementarity, the nucleotide sequence composition (e.g., GC v. AT content) and the nucleic acid type (e.g., RNA v. DNA). Examples of progressively higher stringency condition washes are as follows: 2×SSC, 0.1% SDS at room temperature for 15 minutes (low stringency); 0.1×SSC, 0.5% SDS at room temperature for 30 minutes to 1 hour (moderate stringency); 0.1×SSC, 0.5% SDS for 15 to 30 minutes at between the hybridization temperature and 68° C. (high stringency); and 0.15M NaCl for 15 minutes at 72° C. (very high stringency). A final low stringency wash can be conducted in 0.1×SSC at room temperature. The examples above are merely illustrative of one set of conditions that can be used to wash filters. One of skill in the art would know that there are numerous recipes for different stringency washes. Some other examples are given below.

[0339] In one aspect, hybridization conditions comprise a wash step comprising a wash for 30 minutes at room temperature in a solution comprising 1×150 mM NaCl, 20 mM Tris hydrochloride, pH 7.8, 1 mM Na₂EDTA, 0.5% SDS, followed by a 30 minute wash in fresh solution.

[0340] Nucleic acids which have hybridized to the probe are identified by autoradiography or other conventional techniques.

[0341] The above procedures may be modified to identify nucleic acids having decreasing levels of sequence identity (homology) to the probe sequence. For example, to obtain nucleic acids of decreasing sequence identity (homology) to the detectable probe, less stringent conditions may be used. For example, the hybridization temperature may be decreased in increments of 5° C. from 68° C. to 42° C. in a hybridization buffer having a Na+ concentration of approximately 1M. Following hybridization, the filter may be washed with 2×SSC, 0.5% SDS at the temperature of hybridization. These conditions are considered to be “moderate” conditions above 50° C. and “low” conditions below 50° C. A specific example of “moderate” hybridization conditions is when the above hybridization is conducted at 55° C. A specific example of “low stringency” hybridization conditions is when the above hybridization is conducted at 45° C.

[0342] Alternatively, the hybridization may be carried out in buffers, such as 6×SSC, containing formamide at a temperature of 42° C. In this case, the concentration of formamide in the hybridization buffer may be reduced in 5% increments from 50% to 0% to identify clones having decreasing levels of homology to the probe. Following hybridization, the filter may be washed with 6×SSC, 0.5% SDS at 50° C. These conditions are considered to be “moderate” conditions above 25% formamide and “low” conditions below 25% formamide. A specific example of “moderate” hybridization conditions is when the above hybridization is conducted at 30% formamide. A specific example of “low stringency” hybridization conditions is when the above hybridization is conducted at 10% formamide.

[0343] However, the selection of a hybridization format may not be critical—it is the stringency of the wash conditions that set forth the conditions which determine whether a nucleic acid is within the scope of the invention. Wash conditions used to identify nucleic acids within the scope of the invention include, e.g.: a salt concentration of about 0.02 molar at pH 7 and a temperature of at least about 50° C. or about 55° C. to about 60° C.; or, a salt concentration of about 0.15 M NaCl at 72° C. for about 15 minutes; or, a salt concentration of about 0.2×SSC at a temperature of at least about 50° C. or about 55° C. to about 60° C. for about 15 to about 20 minutes; or, the hybridization complex is washed twice with a solution with a salt concentration of about 2×SSC containing 0.1% SDS at room temperature for 15 minutes and then washed twice by 0.1×SSC containing 0.1% SDS at 68° C. for 15 minutes; or, equivalent conditions. See Sambrook, Tijssen and Ausubel for a description of SSC buffer and equivalent conditions.

[0344] These methods may be used to isolate or identify nucleic acids of the invention. For example, the preceding methods may be used to isolate or identify nucleic acids having a sequence with at least about 50%, 51%, 52%, 53%, 54%, 55%, 56%, 57%, 58%, 59%, 60%, 61%, 62%, 63%, 64%, 65%, 66%, 67%, 68%, 69%, 70%, 71%, 72%, 73%, 74%, 75%, 76%, 77%, 78%, 79%, 80%, 81%, 82%, 83%, 84%, 85%, 86%, 87%, 88%, 89%, 90%, 91%, 92%, 93%, 94%, 95%, 96%, 97%, 98%, 99%, or more sequence identity (homology) to a nucleic acid sequence selected from the group consisting of one of the sequences of the invention, or fragments comprising at least about 10, 15, 20, 25, 30, 35, 40, 50, 75, 100, 150, 200, 300, 400, or 500 consecutive bases thereof and the sequences complementary thereto. Sequence identity (homology) may be measured using the alignment algorithm. For example, the homologous polynucleotides may have a coding sequence which is a naturally occurring allelic variant of one of the coding sequences described herein. Such allelic variants may have a substitution, deletion or addition of one or more nucleotides when compared to the nucleic acids of the invention. Additionally, the above procedures may be used to isolate nucleic acids which encode polypeptides having at least about 99%, 95%, at least 90%, at least 85%, at least 80%, at least 75%, at least 70%, at least 65%, at least 60%, at least 55%, or at least 50% sequence identity (homology) to a polypeptide of the invention, or fragments comprising at least 5, 10, 15, 20, 25, 30, 35, 40, 50, 75, 100, or 150 consecutive amino acids thereof as determined using a sequence alignment algorithm (e.g., such as the FASTA version 3.0t78 algorithm with the default parameters).

### Oligonucleotides Probes and Methods for Using Them

[0345] The invention also provides nucleic acid probes that can be used, e.g., for identifying, amplifying, or isolating nucleic acids encoding a polypeptide having a lignocellulosic activity, e.g., a glycosyl hydrolase, cellulase, endoglucanase, beta-glucosidase, xylanase, mannanse, β-xylosidase and/or arabinofuranosidase enzyme activity or fragments thereof or for identifying the lignocellulosic enzyme genes. In one aspect, the probe comprises at least about 10 or more consecutive bases of a nucleic acid of the invention. Alternatively, a probe of the invention can be at least about 5, 6, 7, 8, 9, 10, 11, 12, 13, 14, 15, 16, 17, 18, 19, 20, 21, 22, 23, 24, 25, 30, 35, 40, 45, 50, 60, 70, 80, 90, 100, 110, 120, 130, 150 or about 10 to 50, about 20 to 60 about 30 to 70, consecutive bases of a sequence of a nucleic acid of the invention. The probes identify a nucleic acid by binding and/or hybridization. The probes can be used in arrays of the invention, see discussion below, including, e.g., capillary arrays. The probes of the invention can also be used to isolate other nucleic acids or polypeptides.

[0346] The isolated, synthetic or recombinant nucleic acids of the invention, the sequences complementary thereto, or a fragment comprising at least about 10, 15, 20, 25, 30, 35, 40, 50, 75, 100, 150, 200, 300, 400, or 500 consecutive bases of one of the sequences of the invention, or the sequences complementary thereto may also be used as probes to determine whether a biological sample, such as a soil sample, contains an organism having a nucleic acid sequence of the invention or an organism from which the nucleic acid was obtained. In such procedures, a biological sample potentially harboring the organism from which the nucleic acid was isolated is obtained and nucleic acids are obtained from the sample. The nucleic acids are contacted with the probe under conditions which permit the probe to specifically hybridize to any complementary sequences from which are present therein.

[0347] Where necessary, conditions which permit the probe to specifically hybridize to complementary sequences may be determined by placing the probe in contact with complementary sequences from samples known to contain the complementary sequence as well as control sequences which do not contain the complementary sequence. Hybridization conditions, such as the salt concentration of the hybridization buffer, the formamide concentration of the hybridization buffer, or the hybridization temperature, may be varied to identify conditions which allow the probe to hybridize specifically to complementary nucleic acids.

[0348] If the sample contains the organism from which the nucleic acid was isolated, specific hybridization of the probe is then detected. Hybridization may be detected by labeling the probe with a detectable agent such as a radioactive isotope, a fluorescent dye or an enzyme capable of catalyzing the formation of a detectable product.

[0349] Many methods for using the labeled probes to detect the presence of complementary nucleic acids in a sample are familiar to those skilled in the art. These include Southern Blots, Northern Blots, colony hybridization procedures and dot blots. Protocols for each of these procedures are provided in Ausubel et al. Current Protocols in

[0350] Molecular Biology, John Wiley 503 Sons, Inc. (1997) and Sambrook et al., Molecular Cloning: A Laboratory Manual 2nd Ed., Cold Spring Harbor Laboratory Press (1989.

[0351] Alternatively, more than one probe (at least one of which is capable of specifically hybridizing to any complementary sequences which are present in the nucleic acid sample), may be used in an amplification reaction to determine whether the sample contains an organism containing a nucleic acid sequence of the invention (e.g., an organism from which the nucleic acid was isolated). In one aspect, the probes comprise oligonucleotides. In one aspect, the amplification reaction may comprise a PCR reaction. PCR protocols are described in Ausubel and Sambrook, supra. Alternatively, the amplification may comprise a ligase chain reaction, 3SR, or strand displacement reaction. (See Barany, F., “The Ligase Chain Reaction in a PCR World”, PCR Methods and Applications 1:5-16, 1991; E. Fahy et al., “Self-sustained Sequence Replication (3SR): An Isothermal Transcription-based Amplification System Alternative to PCR”, PCR Methods and Applications 1:25-33, 1991; and Walker G. T. et al., “Strand Displacement Amplification-an Isothermal in vitro DNA Amplification Technique”, Nucleic Acid Research 20:1691-1696, 1992). In such procedures, the nucleic acids in the sample are contacted with the probes, the amplification reaction is performed and any resulting amplification product is detected. The amplification product may be detected by performing gel electrophoresis on the reaction products and staining the gel with an intercalator such as ethidium bromide. Alternatively, one or more of the probes may be labeled with a radioactive isotope and the presence of a radioactive amplification product may be detected by autoradiography after gel electrophoresis.

[0352] Probes derived from sequences near the ends of the sequences of the invention, may also be used in chromosome walking procedures to identify clones containing genomic sequences located adjacent to the sequences of the invention. Such methods allow the isolation of genes which encode additional proteins from the host organism.

[0353] In one aspect, the isolated, synthetic or recombinant nucleic acids of the invention, the sequences complementary thereto, or a fragment comprising at least 10, 15, 20, 25, 30, 35, 40, 50, 75, 100, 150, 200, 300, 400, or 500 or more consecutive bases of one of the sequences of the invention, or the sequences complementary thereto are used as probes to identify and isolate related nucleic acids. In some aspects, the related nucleic acids may be cDNAs or genomic DNAs from organisms other than the one from which the nucleic acid was isolated. For example, the other organisms may be related organisms. In such procedures, a nucleic acid sample is contacted with the probe under conditions which permit the probe to specifically hybridize to related sequences. Hybridization of the probe to nucleic acids from the related organism is then detected using any of the methods described above.

[0354] By varying the stringency of the hybridization conditions used to identify nucleic acids, such as cDNAs or genomic DNAs, which hybridize to the detectable probe, nucleic acids having different levels of homology to the probe can be identified and isolated. Stringency may be varied by conducting the hybridization at varying temperatures below the melting temperatures of the probes. The melting temperature, Tₘ, is the temperature (under defined ionic strength and pH) at which 50% of the target sequence hybridizes to a perfectly complementary probe. Very stringent conditions are selected to be equal to or about 5° C. lower than the Tₘ for a particular probe. The melting temperature of the probe may be calculated using the following formulas:

[0355] For probes between 14 and 70 nucleotides in length the melting temperature (Tₘ) is calculated using the formula: Tₘ=81.5+16.6(log [Na+])+0.41(fraction G+C)−(600/N) where N is the length of the probe.

[0356] If the hybridization is carried out in a solution containing formamide, the melting temperature may be calculated using the equation: Tₘ=81.5+16.6(log [Na+])+0.41(fraction G+C)−(0.63% formamide)−(600/N) where N is the length of the probe.

[0357] Prehybridization may be carried out in 6×SSC, 5× Denhardt's reagent, 0.5% SDS, 100 μg/ml denatured fragmented salmon sperm DNA or 6×SSC, 5× Denhardt's reagent, 0.5% SDS, 100 μg/ml denatured fragmented salmon sperm DNA, 50% formamide. The formulas for SSC and Denhardt's solutions are listed in Sambrook et al., supra.

[0358] In one aspect, hybridization is conducted by adding the detectable probe to the prehybridization solutions listed above. Where the probe comprises double stranded DNA, it is denatured before addition to the hybridization solution. In one aspect, the filter is contacted with the hybridization solution for a sufficient period of time to allow the probe to hybridize to cDNAs or genomic DNAs containing sequences complementary thereto or homologous thereto. For probes over 200 nucleotides in length, the hybridization may be carried out at 15-25° C. below the Tₘ. For shorter probes, such as oligonucleotide probes, the hybridization may be conducted at 5-10° C. below the Tₘ. In one aspect, for hybridizations in 6×SSC, the hybridization is conducted at approximately 68° C. Usually, for hybridizations in 50% formamide containing solutions, the hybridization is conducted at approximately 42° C.

### Inhibiting Expression of Cellulase Enzymes

[0359] The invention provides nucleic acids complementary to (e.g., antisense sequences to) the nucleic acids of the invention, e.g., cellulase enzyme-encoding nucleic is acids, e.g., nucleic acids comprising antisense, siRNA, miRNA, ribozymes. Nucleic acids of the invention comprising antisense sequences can be capable of inhibiting the transport, splicing or transcription of cellulase enzyme-encoding genes. The inhibition can be effected through the targeting of genomic DNA or messenger RNA. The transcription or function of targeted nucleic acid can be inhibited, for example, by hybridization and/or cleavage. One exemplary set of inhibitors provided by the present invention includes oligonucleotides which are able to either bind the lignocellulosic enzyme, e.g., glycosyl hydrolase, cellulase, endoglucanase, cellobiohydrolase, beta-glucosidase, xylanase, mannanse, β-xylosidase and/or arabinofuranosidase enzyme gene or message, in either case preventing or inhibiting the production or function of a lignocellulosic enzyme. The association can be through sequence specific hybridization. Another useful class of inhibitors includes oligonucleotides which cause inactivation or cleavage of the lignocellulosic enzyme message. The oligonucleotide can have enzyme activity which causes such cleavage, such as ribozymes. The oligonucleotide can be chemically modified or conjugated to an enzyme or composition capable of cleaving the complementary nucleic acid. A pool of many different such oligonucleotides can be screened for those with the desired activity. Thus, the invention provides various compositions for the inhibition of the lignocellulosic enzyme expression on a nucleic acid and/or protein level, e.g., antisense, siRNA, miRNA and ribozymes comprising the lignocellulosic enzyme sequences of the invention and the anti-cellulase, e.g., anti-endoglucanase, anti-cellobiohydrolase and/or anti-beta-glucosidase antibodies of the invention.

[0360] Inhibition of the lignocellulosic enzyme, e.g., glycosyl hydrolase, cellulase, endoglucanase, cellobiohydrolase, beta-glucosidase, xylanase, mannanse, β-xylosidase and/or arabinofuranosidase enzyme expression can have a variety of industrial applications. For example, inhibition of the lignocellulosic enzyme expression can slow or prevent spoilage. In one aspect, use of compositions of the invention that inhibit the expression and/or activity of the lignocellulosic enzymes, e.g., antibodies, antisense oligonucleotides, ribozymes, siRNA and miRNA are used to slow or prevent spoilage. Thus, in one aspect, the invention provides methods and compositions comprising application onto a plant or plant product (e.g., a cereal, a grain, a fruit, seed, root, leaf, etc.) antibodies, antisense oligonucleotides, ribozymes, siRNA and miRNA of the invention to slow or prevent spoilage. These compositions also can be expressed by the plant (e.g., a transgenic plant) or another organism (e.g., a bacterium or other microorganism transformed with a lignocellulosic enzyme coding sequence, e.g., a gene, of the invention).

[0361] The compositions of the invention for the inhibition of the lignocellulosic enzyme, e.g., glycosyl hydrolase, cellulase, endoglucanase, cellobiohydrolase, beta-glucosidase, xylanase, mannanse, β-xylosidase and/or arabinofuranosidase enzyme expression (e.g., antisense, iRNA, ribozymes, antibodies) can be used as pharmaceutical compositions, e.g., as anti-pathogen agents or in other therapies, e.g., as anti-microbials for, e.g., Salmonella.

[0362] Antisense Oligonucleotides

[0363] The invention provides antisense oligonucleotides capable of binding the lignocellulosic enzyme, e.g., glycosyl hydrolase, cellulase, endoglucanase, cellobiohydrolase, beta-glucosidase, xylanase, mannanse, β-xylosidase and/or arabinofuranosidase enzyme message which, in one aspect, can inhibit the lignocellulosic enzyme activity by targeting mRNA. Strategies for designing antisense oligonucleotides are well described in the scientific and patent literature, and the skilled artisan can design such the lignocellulosic enzyme oligonucleotides using the novel reagents of the invention. For example, gene walking/RNA mapping protocols to screen for effective antisense oligonucleotides are well known in the art, see, e.g., Ho (2000) Methods Enzymol. 314:168-183, describing an RNA mapping assay, which is based on standard molecular techniques to provide an easy and reliable method for potent antisense sequence selection. See also Smith (2000) Eur. J. Pharm. Sci. 11:191-198.

[0364] Naturally occurring nucleic acids are used as antisense oligonucleotides. The antisense oligonucleotides can be of any length; for example, in alternative aspects, the antisense oligonucleotides are between about 5 to 100, about 10 to 80, about 15 to 60, about 18 to 40. The optimal length can be determined by routine screening. The antisense oligonucleotides can be present at any concentration. The optimal concentration can be determined by routine screening. A wide variety of synthetic, non-naturally occurring nucleotide and nucleic acid analogues are known which can address this potential problem. For example, peptide nucleic acids (PNAs) containing non-ionic backbones, such as N-(2-aminoethyl) glycine units can be used. Antisense oligonucleotides having phosphorothioate linkages can also be used, as described in WO 97/03211; WO 96/39154; Mata (1997) Toxicol Appl Pharmacol 144:189-197; Antisense Therapeutics, ed. Agrawal (Humana Press, Totowa, N.J., 1996). Antisense oligonucleotides having synthetic DNA backbone analogues provided by the invention can also include phosphorodithioate, methylphosphonate, phosphoramidate, alkyl phosphotriester, sulfamate, 3′-thioacetal, methylene(methylimino), 3′-N-carbamate, and morpholino carbamate nucleic acids, as described above.

[0365] Combinatorial chemistry methodology can be used to create vast numbers of oligonucleotides that can be rapidly screened for specific oligonucleotides that have appropriate binding affinities and specificities toward any target, such as the sense and antisense the lignocellulosic enzyme, e.g., glycosyl hydrolase, cellulase, endoglucanase, cellobiohydrolase, beta-glucosidase, xylanase, mannanse, β-xylosidase and/or arabinofuranosidase enzyme sequences of the invention (see, e.g., Gold (1995) J. of Biol. Chem. 270:13581-13584).

[0366] Inhibitory Ribozymes

[0367] The invention provides ribozymes capable of binding the lignocellulosic enzyme, e.g., glycosyl hydrolase, cellulase, endoglucanase, cellobiohydrolase, beta-glucosidase, xylanase, mannanse, β-xylosidase and/or arabinofuranosidase enzyme message. These ribozymes can inhibit the lignocellulosic enzyme activity by, e.g., targeting mRNA. Strategies for designing ribozymes and selecting the lignocellulosic enzyme-specific antisense sequence for targeting are well described in the scientific and patent literature, and the skilled artisan can design such ribozymes using the novel reagents of the invention. Ribozymes act by binding to a target RNA through the target RNA binding portion of a ribozyme which is held in close proximity to an enzymatic portion of the RNA that cleaves the target RNA. Thus, the ribozyme recognizes and binds a target RNA through complementary base-pairing, and once bound to the correct site, acts enzymatically to cleave and inactivate the target RNA. Cleavage of a target RNA in such a manner will destroy its ability to direct synthesis of an encoded protein if the cleavage occurs in the coding sequence. After a ribozyme has bound and cleaved its RNA target, it can be released from that RNA to bind and cleave new targets repeatedly.

[0368] In some circumstances, the enzymatic nature of a ribozyme can be advantageous over other technologies, such as antisense technology (where a nucleic acid molecule simply binds to a nucleic acid target to block its transcription, translation or association with another molecule) as the effective concentration of ribozyme necessary to effect a therapeutic treatment can be lower than that of an antisense oligonucleotide. This potential advantage reflects the ability of the ribozyme to act enzymatically. Thus, a single ribozyme molecule is able to cleave many molecules of target RNA. In one aspect, a ribozyme is a highly specific inhibitor, with the specificity of inhibition depending not only on the base pairing mechanism of binding, but also on the mechanism by which the molecule inhibits the expression of the RNA to which it binds. That is, the inhibition is caused by cleavage of the RNA target and so specificity is defined as the ratio of the rate of cleavage of the targeted RNA over the rate of cleavage of non-targeted RNA. This cleavage mechanism is dependent upon factors additional to those involved in base pairing. Thus, the specificity of action of a ribozyme can be greater than that of antisense oligonucleotide binding the same RNA site.

[0369] The ribozyme of the invention, e.g., an enzymatic ribozyme RNA molecule, can be formed in a hammerhead motif, a hairpin motif, as a hepatitis delta virus motif, a group I intron motif and/or an RNaseP-like RNA in association with an RNA guide sequence. Examples of hammerhead motifs are described by, e.g., Rossi (1992) Aids Research and Human Retroviruses 8:183; hairpin motifs by Hampel (1989) Biochemistry 28:4929, and Hampel (1990) Nuc. Acids Res. 18:299; the hepatitis delta virus motif by Perrotta (1992) Biochemistry 31:16; the RNaseP motif by Guerrier-Takada (1983) Cell 35:849; and the group I intron by Cech U.S. Pat. No. 4,987,071. The recitation of these specific motifs is not intended to be limiting. Those skilled in the art will recognize that a ribozyme of the invention, e.g., an enzymatic RNA molecule of this invention, can have a specific substrate binding site complementary to one or more of the target gene RNA regions. A ribozyme of the invention can have a nucleotide sequence within or surrounding that substrate binding site which imparts an RNA cleaving activity to the molecule.

[0370] RNA Interference (RNAi)

[0371] In one aspect, the invention provides an RNA inhibitory molecule, a so-called “RNAi” molecule, comprising a lignocellulosic enzyme, e.g., a glycosyl hydrolase, cellulase, endoglucanase, cellobiohydrolase, beta-glucosidase, xylanase, mannanse, β-xylosidase and/or arabinofuranosidase enzyme sequence of the invention. The RNAi molecule can comprise a double-stranded RNA (dsRNA) molecule, e.g., siRNA and/or miRNA. The RNAi molecule, e.g., siRNA and/or miRNA, can inhibit expression of a lignocellulosic enzyme gene. In one aspect, the RNAi molecule, e.g., siRNA and/or miRNA, is about 15, 16, 17, 18, 19, 20, 21, 22, 23, 24, 25 or more duplex nucleotides in length. While the invention is not limited by any particular mechanism of action, the RNAi can enter a cell and cause the degradation of a single-stranded RNA (ssRNA) of similar or identical sequences, including endogenous mRNAs. When a cell is exposed to double-stranded RNA (dsRNA), mRNA from the homologous gene is selectively degraded by a process called RNA interference (RNAi). A possible basic mechanism behind RNAi is the breaking of a double-stranded RNA (dsRNA) matching a specific gene sequence into short pieces called short interfering RNA, which trigger the degradation of mRNA that matches its sequence. In one aspect, the RNAi's of the invention are used in gene-silencing therapeutics, see, e.g., Shuey (2002) Drug Discov. Today 7:1040-1046. In one aspect, the invention provides methods to selectively degrade RNA using the RNAi's molecules, e.g., siRNA and/or miRNA, of the invention. The process may be practiced in vitro, ex vivo or in vivo. In one aspect, the RNAi molecules of the invention can be used to generate a loss-of-function mutation in a cell, an organ or an animal. Methods for making and using RNAi molecules, e.g., siRNA and/or miRNA, for selectively degrade RNA are well known in the art, see, e.g., U.S. Pat. Nos. 6,506,559; 6,511,824; 6,515,109; 6,489,127.

### Modification of Nucleic Acids—Making Variant Enzymes of the Invention

[0372] The invention provides methods of generating variants of the nucleic acids of the invention, e.g., those encoding a lignocellulosic enzyme, e.g., a glycosyl hydrolase, cellulase, endoglucanase, cellobiohydrolase, beta-glucosidase, xylanase, mannanse, β-xylosidase and/or arabinofuranosidase enzyme. These methods can be repeated or used in various combinations to generate the lignocellulosic enzymes having an altered or different activity or an altered or different stability from that of a lignocellulosic enzyme encoded by the template nucleic acid. These methods also can be repeated or used in various combinations, e.g., to generate variations in gene/ message expression, message translation or message stability. In another aspect, the genetic composition of a cell is altered by, e.g., modification of a homologous gene ex vivo, followed by its reinsertion into the cell.

[0373] A nucleic acid of the invention can be altered by any means. For example, random or stochastic methods, or, non-stochastic, or “directed evolution,” methods, see, e.g., U.S. Pat. No. 6,361,974. Methods for random mutation of genes are well known in the art, see, e.g., U.S. Pat. No. 5,830,696. For example, mutagens can be used to randomly mutate a gene. Mutagens include, e.g., ultraviolet light or gamma irradiation, or a chemical mutagen, e.g., mitomycin, nitrous acid, photoactivated psoralens, alone or in combination, to induce DNA breaks amenable to repair by recombination. Other chemical mutagens include, for example, sodium bisulfite, nitrous acid, hydroxylamine, hydrazine or formic acid. Other mutagens are analogues of nucleotide precursors, e.g., nitrosoguanidine, 5-bromouracil, 2-aminopurine, or acridine. These agents can be added to a PCR reaction in place of the nucleotide precursor thereby mutating the sequence. Intercalating agents such as proflavine, acriflavine, quinacrine and the like can also be used.

[0374] Any technique in molecular biology can be used, e.g., random PCR mutagenesis, see, e.g., Rice (1992) Proc. Natl. Acad. Sci. USA 89:5467-5471; or, combinatorial multiple cassette mutagenesis, see, e.g., Crameri (1995) Biotechniques 18:194-196. Alternatively, nucleic acids, e.g., genes, can be reassembled after random, or “stochastic,” fragmentation, see, e.g., U.S. Pat. Nos. 6,291,242; 6,287,862; 6,287,861; 5,955,358; 5,830,721; 5,824,514; 5,811,238; 5,605,793. In alternative aspects, modifications, additions or deletions are introduced by error-prone PCR, shuffling, oligonucleotide-directed mutagenesis, assembly PCR, sexual PCR mutagenesis, in vivo mutagenesis, cassette mutagenesis, recursive ensemble mutagenesis, exponential ensemble mutagenesis, site-specific mutagenesis, gene reassembly, GENE SITE SATURATION MUTAGENESIS (or GSSM), synthetic ligation reassembly (SLR), recombination, recursive sequence recombination, phosphothioate-modified DNA mutagenesis, uracil-containing template mutagenesis, gapped duplex mutagenesis, point mismatch repair mutagenesis, repair-deficient host strain mutagenesis, chemical mutagenesis, radiogenic mutagenesis, deletion mutagenesis, restriction-selection mutagenesis, restriction-purification mutagenesis, artificial gene synthesis, ensemble mutagenesis, chimeric nucleic acid multimer creation, Chromosomal Saturation Mutagenesis (CSM) and/or a combination of these and other methods.

[0375] The following publications describe a variety of recursive recombination procedures and/or methods which can be incorporated into the methods of the invention: Stemmer (1999) “Molecular breeding of viruses for targeting and other clinical properties” Tumor Targeting 4:1-4; Ness (1999) Nature Biotechnology 17:893-896; Chang (1999) “Evolution of a cytokine using DNA family shuffling” Nature Biotechnology 17:793-797; Minshull (1999) “Protein evolution by molecular breeding” Current Opinion in Chemical Biology 3:284-290; Christians (1999) “Directed evolution of thymidine kinase for AZT phosphorylation using DNA family shuffling” Nature Biotechnology 17:259-264; Crameri (1998) “DNA shuffling of a family of genes from diverse species accelerates directed evolution” Nature 391:288-291; Crameri (1997) “Molecular evolution of an arsenate detoxification pathway by DNA shuffling,” Nature Biotechnology 15:436-438; Zhang (1997) “Directed evolution of an effective fucosidase from a galactosidase by DNA shuffling and screening” Proc. Natl. Acad. Sci. USA 94:4504-4509; Patten et al. (1997) “Applications of DNA Shuffling to Pharmaceuticals and Vaccines” Current Opinion in Biotechnology 8:724-733; Crameri et al. (1996) “Construction and evolution of antibody-phage libraries by DNA shuffling” Nature Medicine 2:100-103; Gates et al. (1996) “Affinity selective isolation of ligands from peptide libraries through display on a lac repressor ‘headpiece dimer’” Journal of Molecular Biology 255:373-386; Stemmer (1996) “Sexual PCR and Assembly PCR” In: The Encyclopedia of Molecular Biology. VCH Publishers, New York. pp. 447-457; Crameri and Stemmer (1995) “Combinatorial multiple cassette mutagenesis creates all the permutations of mutant and wildtype cassettes” BioTechniques 18:194-195; Stemmer et al. (1995) “Single-step assembly of a gene and entire plasmid form large numbers of oligodeoxyribonucleotides” Gene, 164:49-53; Stemmer (1995) “The Evolution of Molecular Computation” Science 270: 1510; Stemmer (1995) “Searching Sequence Space” Bio/Technology 13:549-553; Stemmer (1994) “Rapid evolution of a protein in vitro by DNA shuffling” Nature 370:389-391; and Stemmer (1994) “DNA shuffling by random fragmentation and reassembly: In vitro recombination for molecular evolution.” Proc. Natl. Acad. Sci. USA 91:10747-10751.

[0376] Mutational methods of generating diversity include, for example, site-directed mutagenesis (Ling et al. (1997) “Approaches to DNA mutagenesis: an overview” Anal Biochem. 254(2): 157-178; Dale et al. (1996) “Oligonucleotide-directed random mutagenesis using the phosphorothioate method” Methods Mol. Biol. 57:369-374; Smith (1985) “In vitro mutagenesis” Ann. Rev. Genet. 19:423-462; Botstein & Shortle (1985) “Strategies and applications of in vitro mutagenesis” Science 229:1193-1201; Carter (1986) “Site-directed mutagenesis” Biochem. J. 237:1-7; and Kunkel (1987) “The efficiency of oligonucleotide directed mutagenesis” in Nucleic Acids & Molecular Biology (Eckstein, F. and Lilley, D. M. J. eds., Springer Verlag, Berlin)); mutagenesis using uracil containing templates (Kunkel (1985) “Rapid and efficient site-specific mutagenesis without phenotypic selection” Proc. Natl. Acad. Sci. USA 82:488-492; Kunkel et al. (1987) “Rapid and efficient site-specific mutagenesis without phenotypic selection” Methods in Enzymol. 154, 367-382; and Bass et al. (1988) “Mutant Trp repressors with new DNA-binding specificities” Science 242:240-245); oligonucleotide-directed mutagenesis (Methods in Enzymol. 100: 468-500 (1983); Methods in Enzymol. 154: 329-350 (1987); Zoller (1982) “Oligonucleotide-directed mutagenesis using M13-derived vectors: an efficient and general procedure for the production of point mutations in any DNA fragment” Nucleic Acids Res. 10:6487-6500; Zoller & Smith (1983)

[0377] “Oligonucleotide-directed mutagenesis of DNA fragments cloned into M13 vectors” Methods in Enzymol. 100:468-500; and Zoller (1987) Oligonucleotide-directed mutagenesis: a simple method using two oligonucleotide primers and a single-stranded DNA template” Methods in Enzymol. 154:329-350); phosphorothioate-modified DNA mutagenesis (Taylor (1985) “The use of phosphorothioate-modified DNA in restriction enzyme reactions to prepare nicked DNA” Nucl. Acids Res. 13: 8749-8764; Taylor (1985) “The rapid generation of oligonucleotide-directed mutations at high frequency using phosphorothioate-modified DNA” Nucl. Acids Res. 13: 8765-8787 (1985); Nakamaye (1986) “Inhibition of restriction endonuclease Nci I cleavage by phosphorothioate groups and its application to oligonucleotide-directed mutagenesis” Nucl. Acids Res. 14: 9679-9698; Sayers (1988) “Y-T Exonucleases in phosphorothioate-based oligonucleotide-directed mutagenesis” Nucl. Acids Res. 16:791-802; and Sayers et al. (1988) “Strand specific cleavage of phosphorothioate-containing DNA by reaction with restriction endonucleases in the presence of ethidium bromide” Nucl. Acids Res. 16: 803-814); mutagenesis using gapped duplex DNA (Kramer et al. (1984) “The gapped duplex DNA approach to oligonucleotide-directed mutation construction” Nucl. Acids Res. 12: 9441-9456; Kramer & Fritz (1987) Methods in Enzymol. “Oligonucleotide-directed construction of mutations via gapped duplex DNA” 154:350-367; Kramer (1988) “Improved enzymatic in vitro reactions in the gapped duplex DNA approach to oligonucleotide-directed construction of mutations” Nucl. Acids Res. 16: 7207; and Fritz (1988) “Oligonucleotide-directed construction of mutations: a gapped duplex DNA procedure without enzymatic reactions in vitro” Nucl. Acids Res. 16: 6987-6999).

[0378] Additional protocols that can be used to practice the invention include point mismatch repair (Kramer (1984) “Point Mismatch Repair” Cell 38:879-887), mutagenesis using repair-deficient host strains (Carter et al. (1985) “Improved oligonucleotide site-directed mutagenesis using M13 vectors” Nucl. Acids Res. 13: 4431-4443; and Carter (1987) “Improved oligonucleotide-directed mutagenesis using M13 vectors” Methods in Enzymol. 154: 382-403), deletion mutagenesis (Eghtedarzadeh (1986) “Use of oligonucleotides to generate large deletions” Nucl. Acids Res. 14: 5115), restriction-selection and restriction-selection and restriction-purification (Wells et al. (1986) “Importance of hydrogen-bond formation in stabilizing the transition state of subtilisin” Phil. Trans. R. Soc. Lond. A 317: 415-423), mutagenesis by total gene synthesis (Nambiar et al. (1984) “Total synthesis and cloning of a gene coding for the ribonuclease S protein” Science 223: 1299-1301; Sakamar and Khorana (1988) “Total synthesis and expression of a gene for the α-subunit of bovine rod outer segment guanine nucleotide-binding protein (transducin)” Nucl. Acids Res. 14: 6361-6372; Wells et al. (1985) “Cassette mutagenesis: an efficient method for generation of multiple mutations at defined sites” Gene 34:315-323; and Grundstrom et al. (1985) “Oligonucleotide-directed mutagenesis by microscale ‘shot-gun’ gene synthesis” Nucl. Acids Res. 13: 3305-3316), double-strand break repair (Mandecki (1986); Arnold (1993) “Protein engineering for unusual environments” Current Opinion in Biotechnology 4:450-455. “Oligonucleotide-directed double-strand break repair in plasmids of Escherichia coli: a method for site-specific mutagenesis” Proc. Natl. Acad. Sci. USA, 83:7177-7181). Additional details on many of the above methods can be found in Methods in Enzymology Volume 154, which also describes useful controls for trouble-shooting problems with various mutagenesis methods.

[0379] Protocols that can be used to practice the invention are described, e.g., in U.S. Pat. Nos. 5,605,793 to Stemmer (Feb. 25, 1997), “Methods for In Vitro Recombination;” U.S. Pat. No. 5,811,238 to Stemmer et al. (Sep. 22, 1998) “Methods for Generating Polynucleotides having Desired Characteristics by Iterative Selection and Recombination;” U.S. Pat. No. 5,830,721 to Stemmer et al. (Nov. 3, 1998), “DNA Mutagenesis by Random Fragmentation and Reassembly;” U.S. Pat. No. 5,834,252 to Stemmer, et al. (Nov. 10, 1998) “End-Complementary Polymerase Reaction;” U.S. Pat. No. 5,837,458 to Minshull, et al. (Nov. 17, 1998), “Methods and Compositions for Cellular and Metabolic Engineering;” WO 95/22625, Stemmer and Crameri, “Mutagenesis by Random Fragmentation and Reassembly;” WO 96/33207 by Stemmer and Lipschutz “End Complementary Polymerase Chain Reaction;” WO 97/20078 by Stemmer and Crameri “Methods for Generating Polynucleotides having Desired Characteristics by Iterative Selection and Recombination;” WO 97/35966 by Minshull and Stemmer, “Methods and Compositions for Cellular and Metabolic Engineering;” WO 99/41402 by Punnonen et al. “Targeting of Genetic Vaccine Vectors;” WO 99/41383 by Punnonen et al. “Antigen Library Immunization;” WO 99/41369 by Punnonen et al. “Genetic Vaccine Vector Engineering;” WO 99/41368 by Punnonen et al. “Optimization of Immunomodulatory Properties of Genetic Vaccines;” EP 752008 by Stemmer and Crameri, “DNA Mutagenesis by Random Fragmentation and Reassembly;” EP 0932670 by Stemmer “Evolving Cellular DNA Uptake by Recursive Sequence Recombination;” WO 99/23107 by Stemmer et al., “Modification of Virus Tropism and Host Range by Viral Genome Shuffling;” WO 99/21979 by Apt et al., “Human Papillomavirus Vectors;” WO 98/31837 by del Cardayre et al. “Evolution of Whole Cells and Organisms by Recursive Sequence Recombination;” WO 98/27230 by Patten and Stemmer, “Methods and Compositions for Polypeptide Engineering;” WO 98/27230 by Stemmer et al., “Methods for Optimization of Gene Therapy by Recursive Sequence Shuffling and Selection,” WO 00/00632, “Methods for Generating Highly Diverse Libraries,” WO 00/09679, “Methods for Obtaining in Vitro Recombined Polynucleotide Sequence Banks and Resulting Sequences,” WO 98/42832 by Arnold et al., “Recombination of Polynucleotide Sequences Using Random or Defined Primers,” WO 99/29902 by Arnold et al., “Method for Creating Polynucleotide and Polypeptide Sequences,” WO 98/41653 by Vind, “An in Vitro Method for Construction of a DNA Library,” WO 98/41622 by Borchert et al., “Method for Constructing a Library Using DNA Shuffling,” and WO 98/42727 by Pati and Zarling, “Sequence Alterations using Homologous Recombination.”

[0380] Protocols that can be used to practice the invention (providing details regarding various diversity generating methods) are described, e.g., in U.S. patent application Ser. No. 09/407,800, “SHUFFLING OF CODON ALTERED GENES” by Patten et al. filed Sep. 28, 1999; “EVOLUTION OF WHOLE CELLS AND ORGANISMS BY RECURSIVE SEQUENCE RECOMBINATION” by del Cardayre et al., U.S. Pat. No. 6,379,964; “OLIGONUCLEOTIDE MEDIATED NUCLEIC ACID RECOMBINATION” by Crameri et al., U.S. Pat. Nos. 6,319,714; 6,368,861; 6,376,246; 6,423,542; 6,426,224 and PCT/US00/01203; “USE OF CODON-VARIED OLIGONUCLEOTIDE SYNTHESIS FOR SYNTHETIC SHUFFLING” by Welch et al., U.S. Pat. No. 6,436,675; “METHODS FOR MAKING CHARACTER STRINGS, POLYNUCLEOTIDES & POLYPEPTIDES HAVING DESIRED CHARACTERISTICS” by Selifonov et al., filed Jan. 18, 2000, (PCT/US00/01202) and, e.g. “METHODS FOR MAKING CHARACTER STRINGS, POLYNUCLEOTIDES & POLYPEPTIDES HAVING DESIRED CHARACTERISTICS” by Selifonov et al., filed Jul. 18, 2000 (U.S. Ser. No. 09/618,579); “METHODS OF POPULATING DATA STRUCTURES FOR USE IN EVOLUTIONARY SIMULATIONS” by Selifonov and Stemmer, filed Jan. 18, 2000 (PCT/US00/01138); and “SINGLE-STRANDED NUCLEIC ACID TEMPLATE-MEDIATED RECOMBINATION AND NUCLEIC ACID FRAGMENT ISOLATION” by Affholter, filed Sep. 6, 2000 (U.S. Ser. No. 09/656,549); and U.S. Pat. Nos. 6,177,263; 6,153,410.

[0381] Non-stochastic, or “directed evolution,” methods include, e.g., saturation mutagenesis, such as GENE SITE SATURATION MUTAGENESIS (or GSSM), synthetic ligation reassembly (SLR), or a combination thereof are used to modify the nucleic acids of the invention to generate the lignocellulosic enzyme, e.g., glycosyl hydrolase, cellulase, endoglucanase, cellobiohydrolase, beta-glucosidase, xylanase, mannanse, β-xylosidase and/or arabinofuranosidase enzymes with new or altered properties (e.g., activity under highly acidic or alkaline conditions, high or low temperatures, and the like). Polypeptides encoded by the modified nucleic acids can be screened for an activity before testing for glucan hydrolysis or other activity. Any testing modality or protocol can be used, e.g., using a capillary array platform. See, e.g., U.S. Pat. Nos. 6,361,974; 6,280,926; 5,939,250.

[0382] GENE SITE SATURATION MUTAGENESIS or GSSM

[0383] The invention also provides methods for making enzyme using GENE SITE SATURATION MUTAGENESIS or GSSM, as described herein, and also in U.S. Pat. Nos. 6,171,820 and 6,579,258. The GENE SITE SATURATION MUTAGENESIS (or GSSM) approach is used for achieving all possible amino acid changes at each amino acid site along the polypeptide. The oligos used are comprised of a homologous sequence, a triplet sequence composed of degenerate N,N, G/T, and another homologous sequence. Thus, the degeneracy of each oligo is derived from the degeneracy of the N,N, G/T cassette contained therein. The resultant polymerization products from the use of such oligos include all possible amino acid changes at each amino acid site along the polypeptide, because the N,N, G/T sequence is able to code for all 20 amino acids. As shown, a separate degenerate oligo is used for mutagenizing each codon in a polynucleotide encoding a polypeptide.

[0384] In one aspect, codon primers containing a degenerate N,N,G/T sequence are used to introduce point mutations into a polynucleotide, e.g., a lignocellulosic enzyme, e.g., a glycosyl hydrolase, cellulase, endoglucanase, cellobiohydrolase, beta-glucosidase, xylanase, mannanse, β-xylosidase and/or arabinofuranosidase enzyme or an antibody of the invention, so as to generate a set of progeny polypeptides in which a full range of single amino acid substitutions is represented at each amino acid position, e.g., an amino acid residue in an enzyme active site or ligand binding site targeted to be modified. These oligonucleotides can comprise a contiguous first homologous sequence, a degenerate N,N,G/T sequence, and, optionally, a second homologous sequence. The downstream progeny translational products from the use of such oligonucleotides include all possible amino acid changes at each amino acid site along the polypeptide, because the degeneracy of the N,N,G/T sequence includes codons for all 20 amino acids. In one aspect, one such degenerate oligonucleotide (comprised of, e.g., one degenerate N,N,G/T cassette) is used for subjecting each original codon in a parental polynucleotide template to a full range of codon substitutions. In another aspect, at least two degenerate cassettes are used—either in the same oligonucleotide or not, for subjecting at least two original codons in a parental polynucleotide template to a full range of codon substitutions. For example, more than one N,N,G/T sequence can be contained in one oligonucleotide to introduce amino acid mutations at more than one site. This plurality of N,N,G/T sequences can be directly contiguous, or separated by one or more additional nucleotide sequence(s). In another aspect, oligonucleotides serviceable for introducing additions and deletions can be used either alone or in combination with the codons containing an N,N,G/T sequence, to introduce any combination or permutation of amino acid additions, deletions, and/or substitutions.

[0385] In one aspect, simultaneous mutagenesis of two or more contiguous amino acid positions is done using an oligonucleotide that contains contiguous N,N,G/T triplets, i.e. a degenerate (N,N,G/T)n sequence. In another aspect, degenerate cassettes having less degeneracy than the N,N,G/T sequence are used. For example, it may be desirable in some instances to use (e.g. in an oligonucleotide) a degenerate triplet sequence comprised of only one N, where said N can be in the first second or third position of the triplet. Any other bases including any combinations and permutations thereof can be used in the remaining two positions of the triplet. Alternatively, it may be desirable in some instances to use (e.g. in an oligo) a degenerate N,N,N triplet sequence.

[0386] In one aspect, use of degenerate triplets (e.g., N,N,G/T triplets) allows for systematic and easy generation of a full range of possible natural amino acids (for a total of 20 amino acids) into each and every amino acid position in a polypeptide (in alternative aspects, the methods also include generation of less than all possible substitutions per amino acid residue, or codon, position). For example, for a 100 amino acid polypeptide, 2000 distinct species (i.e. 20 possible amino acids per position X 100 amino acid positions) can be generated. Through the use of an oligonucleotide or set of oligonucleotides containing a degenerate N,N,G/T triplet, 32 individual sequences can code for all 20 possible natural amino acids. Thus, in a reaction vessel in which a parental polynucleotide sequence is subjected to saturation mutagenesis using at least one such oligonucleotide, there are generated 32 distinct progeny polynucleotides encoding 20 distinct polypeptides. In contrast, the use of a non-degenerate oligonucleotide in site-directed mutagenesis leads to only one progeny polypeptide product per reaction vessel. Nondegenerate oligonucleotides can optionally be used in combination with degenerate primers disclosed; for example, nondegenerate oligonucleotides can be used to generate specific point mutations in a working polynucleotide. This provides one means to generate specific silent point mutations, point mutations leading to corresponding amino acid changes, and point mutations that cause the generation of stop codons and the corresponding expression of polypeptide fragments.

[0387] In one aspect, each saturation mutagenesis reaction vessel contains polynucleotides encoding at least 20 progeny polypeptide (e.g., the lignocellulosic enzyme, e.g., glycosyl hydrolase, cellulase, endoglucanase, cellobiohydrolase, beta-glucosidase, xylanase, mannanse, β-xylosidase and/or arabinofuranosidase enzymes) molecules such that all 20 natural amino acids are represented at the one specific amino acid position corresponding to the codon position mutagenized in the parental polynucleotide (other aspects use less than all 20 natural combinations). The 32-fold degenerate progeny polypeptides generated from each saturation mutagenesis reaction vessel can be subjected to clonal amplification (e.g. cloned into a suitable host, e.g., E. coli host, using, e.g., an expression vector) and subjected to expression screening. When an individual progeny polypeptide is identified by screening to display a favorable change in property (when compared to the parental polypeptide, such as increased glucan hydrolysis activity under alkaline or acidic conditions), it can be sequenced to identify the correspondingly favorable amino acid substitution contained therein.

[0388] In one aspect, upon mutagenizing each and every amino acid position in a parental polypeptide using saturation mutagenesis as disclosed herein, favorable amino acid changes may be identified at more than one amino acid position. One or more new progeny molecules can be generated that contain a combination of all or part of these favorable amino acid substitutions. For example, if 2 specific favorable amino acid changes are identified in each of 3 amino acid positions in a polypeptide, the permutations include 3 possibilities at each position (no change from the original amino acid, and each of two favorable changes) and 3 positions. Thus, there are 3×3×3 or 27 total possibilities, including 7 that were previously examined—6 single point mutations (i.e. 2 at each of three positions) and no change at any position.

[0389] In yet another aspect, site-saturation mutagenesis can be used together with shuffling, chimerization, recombination and other mutagenizing processes, along with screening. This invention provides for the use of any mutagenizing process(es), including saturation mutagenesis, in an iterative manner. In one exemplification, the iterative use of any mutagenizing process(es) is used in combination with screening.

[0390] The invention also provides for the use of proprietary codon primers (containing a degenerate N,N,N sequence) to introduce point mutations into a polynucleotide, so as to generate a set of progeny polypeptides in which a full range of single amino acid substitutions is represented at each amino acid position (GENE SITE SATURATION MUTAGENESIS™ (or GSSM)). The oligos used are comprised contiguously of a first homologous sequence, a degenerate N,N,N sequence and in one aspect but not necessarily a second homologous sequence. The downstream progeny translational products from the use of such oligos include all possible amino acid changes at each amino acid site along the polypeptide, because the degeneracy of the N,N,N sequence includes codons for all 20 amino acids.

[0391] In one aspect, one such degenerate oligo (comprised of one degenerate N,N,N cassette) is used for subjecting each original codon in a parental polynucleotide template to a full range of codon substitutions. In another aspect, at least two degenerate N,N,N cassettes are used—either in the same oligo or not, for subjecting at least two original codons in a parental polynucleotide template to a full range of codon substitutions. Thus, more than one N,N,N sequence can be contained in one oligo to introduce amino acid mutations at more than one site. This plurality of N,N,N sequences can be directly contiguous, or separated by one or more additional nucleotide sequence(s). In another aspect, oligos serviceable for introducing additions and deletions can be used either alone or in combination with the codons containing an N,N,N sequence, to introduce any combination or permutation of amino acid additions, deletions and/or substitutions.

[0392] In one aspect, it is possible to simultaneously mutagenize two or more io contiguous amino acid positions using an oligo that contains contiguous N,N,N triplets, i.e. a degenerate (N,N,N)ₙ sequence. In another aspect, the present invention provides for the use of degenerate cassettes having less degeneracy than the N,N,N sequence. For example, it may be desirable in some instances to use (e.g. in an oligo) a degenerate triplet sequence comprised of only one N, where the N can be in the first second or third position of the triplet. Any other bases including any combinations and permutations thereof can be used in the remaining two positions of the triplet. Alternatively, it may be desirable in some instances to use (e.g., in an oligo) a degenerate N,N,N triplet sequence, N,N,G/T, or an N,N, G/C triplet sequence.

[0393] In one aspect, use of a degenerate triplet (such as N,N,G/T or an N,N, G/C triplet sequence) is advantageous for several reasons. In one aspect, this invention provides a means to systematically and fairly easily generate the substitution of the full range of possible amino acids (for a total of 20 amino acids) into each and every amino acid position in a polypeptide. Thus, for a 100 amino acid polypeptide, the invention provides a way to systematically and fairly easily generate 2000 distinct species (i.e., 20 possible amino acids per position times 100 amino acid positions). It is appreciated that there is provided, through the use of an oligo containing a degenerate N,N,G/T or an N,N, G/C triplet sequence, 32 individual sequences that code for 20 possible amino acids. Thus, in a reaction vessel in which a parental polynucleotide sequence is subjected to saturation mutagenesis using one such oligo, there are generated 32 distinct progeny polynucleotides encoding 20 distinct polypeptides. In contrast, the use of a non-degenerate oligo in site-directed mutagenesis leads to only one progeny polypeptide product per reaction vessel.

[0394] This invention also provides for the use of nondegenerate oligos, which can optionally be used in combination with degenerate primers disclosed. It is appreciated that in some situations, it is advantageous to use nondegenerate oligos to generate specific point mutations in a working polynucleotide. This provides a means to generate specific silent point mutations, point mutations leading to corresponding amino acid changes and point mutations that cause the generation of stop codons and the corresponding expression of polypeptide fragments.

[0395] Thus, in one aspect of this invention, each saturation mutagenesis reaction vessel contains polynucleotides encoding at least 20 progeny polypeptide molecules such that all 20 amino acids are represented at the one specific amino acid position corresponding to the codon position mutagenized in the parental polynucleotide. The 32-fold degenerate progeny polypeptides generated from each saturation mutagenesis reaction vessel can be subjected to clonal amplification (e.g., cloned into a suitable E. coli host using an expression vector) and subjected to expression screening. When an individual progeny polypeptide is identified by screening to display a favorable change in property (when compared to the parental polypeptide), it can be sequenced to identify the correspondingly favorable amino acid substitution contained therein.

[0396] In one aspect, upon mutagenizing each and every amino acid position in a parental polypeptide using saturation mutagenesis as disclosed herein, a favorable amino acid changes is identified at more than one amino acid position. One or more new progeny molecules can be generated that contain a combination of all or part of these favorable amino acid substitutions. For example, if 2 specific favorable amino acid changes are identified in each of 3 amino acid positions in a polypeptide, the permutations include 3 possibilities at each position (no change from the original amino acid and each of two favorable changes) and 3 positions. Thus, there are 3×3×3 or 27 total possibilities, including 7 that were previously examined—6 single point mutations (i.e., 2 at each of three positions) and no change at any position.

[0397] The invention provides for the use of saturation mutagenesis in combination with additional mutagenization processes, such as process where two or more related polynucleotides are introduced into a suitable host cell such that a hybrid polynucleotide is generated by recombination and reductive reassortment.

[0398] In addition to performing mutagenesis along the entire sequence of a gene, the instant invention provides that mutagenesis can be use to replace each of any number of bases in a polynucleotide sequence, wherein the number of bases to be mutagenized is in one aspect every integer from 15 to 100,000. Thus, instead of mutagenizing every position along a molecule, one can subject every or a discrete number of bases (in one aspect a subset totaling from 15 to 100,000) to mutagenesis. In one aspect, a separate nucleotide is used for mutagenizing each position or group of positions along a polynucleotide sequence. A group of 3 positions to be mutagenized may be a codon. The mutations can be introduced using a mutagenic primer, containing a heterologous cassette, also referred to as a mutagenic cassette. Exemplary cassettes can have from 1 to 500 bases. Each nucleotide position in such heterologous cassettes be N, A, C, G, T, A/C, A/G, A/T, C/G, C/T, G/T, C/G/T, A/G/T, A/C/T, A/C/G, or E, where E is any base that is not A, C, G, or T (E can be referred to as a designer oligo).

[0399] In one aspect, saturation mutagenesis is comprised of mutagenizing a complete io set of mutagenic cassettes (wherein each cassette is in one aspect about 1-500 bases in length) in defined polynucleotide sequence to be mutagenized (wherein the sequence to be mutagenized is in one aspect from about 15 to 100,000 bases in length). Thus, a group of mutations (ranging from 1 to 100 mutations) is introduced into each cassette to be mutagenized. A grouping of mutations to be introduced into one cassette can be different or the same from a second grouping of mutations to be introduced into a second cassette during the application of one round of saturation mutagenesis. Such groupings are exemplified by deletions, additions, groupings of particular codons and groupings of particular nucleotide cassettes.

[0400] In one aspect, defined sequences to be mutagenized include a whole gene, pathway, cDNA, an entire open reading frame (ORF) and entire promoter, enhancer, repressor/transactivator, origin of replication, intron, operator, or any polynucleotide functional group. Generally, a “defined sequences” for this purpose may be any polynucleotide that a 15 base-polynucleotide sequence and polynucleotide sequences of lengths between 15 bases and 15,000 bases (this invention specifically names every integer in between). Considerations in choosing groupings of codons include types of amino acids encoded by a degenerate mutagenic cassette.

[0401] In one aspect, a grouping of mutations that can be introduced into a mutagenic cassette, this invention specifically provides for degenerate codon substitutions (using degenerate oligos) that code for 2, 3, 4, 5, 6, 7, 8, 9, 10, 11, 12, 13, 14, 15, 16, 17, 18, 19 and 20 amino acids at each position and a library of polypeptides encoded thereby.

[0402] Synthetic Ligation Reassembly (SLR)

[0403] The invention provides a non-stochastic gene modification system termed “synthetic ligation reassembly,” or simply “SLR,” a “directed evolution process,” to generate polypeptides, e.g., the lignocellulosic enzyme, e.g., glycosyl hydrolase, cellulase, endoglucanase, cellobiohydrolase, beta-glucosidase, xylanase, mannanse, β-xylosidase and/or arabinofuranosidase enzymes or antibodies of the invention, with new or altered properties.

[0404] SLR is a method of ligating oligonucleotide fragments together non-stochastically. This method differs from stochastic oligonucleotide shuffling in that the nucleic acid building blocks are not shuffled, concatenated or chimerized randomly, but rather are assembled non-stochastically. See, e.g., U.S. Pat. Nos. 6,773,900; 6,740,506; 6,713,282; 6,635,449; 6,605,449; 6,537,776. In one aspect, SLR comprises the following steps: (a) providing a template polynucleotide, wherein the template polynucleotide comprises sequence encoding a homologous gene; (b) providing a plurality of building block polynucleotides, wherein the building block polynucleotides are designed to cross-over reassemble with the template polynucleotide at a predetermined sequence, and a building block polynucleotide comprises a sequence that is a variant of the homologous gene and a sequence homologous to the template polynucleotide flanking the variant sequence; (c) combining a building block polynucleotide with a template polynucleotide such that the building block polynucleotide cross-over reassembles with the template polynucleotide to generate polynucleotides comprising homologous gene sequence variations.

[0405] SLR does not depend on the presence of high levels of homology between polynucleotides to be rearranged. Thus, this method can be used to non-stochastically generate libraries (or sets) of progeny molecules comprised of over 10¹⁰⁰ different chimeras. SLR can be used to generate libraries comprised of over 10¹⁰⁰ different progeny chimeras. Thus, aspects of the present invention include non-stochastic methods of producing a set of finalized chimeric nucleic acid molecule shaving an overall assembly order that is chosen by design. This method includes the steps of generating by design a plurality of specific nucleic acid building blocks having serviceable mutually compatible ligatable ends, and assembling these nucleic acid building blocks, such that a designed overall assembly order is achieved.

[0406] The mutually compatible ligatable ends of the nucleic acid building blocks to be assembled are considered to be “serviceable” for this type of ordered assembly if they enable the building blocks to be coupled in predetermined orders. Thus, the overall assembly order in which the nucleic acid building blocks can be coupled is specified by the design of the ligatable ends. If more than one assembly step is to be used, then the overall assembly order in which the nucleic acid building blocks can be coupled is also specified by the sequential order of the assembly step(s). In one aspect, the annealed building pieces are treated with an enzyme, such as a ligase (e.g. T4 DNA ligase), to achieve covalent bonding of the building pieces.

[0407] In one aspect, the design of the oligonucleotide building blocks is obtained by analyzing a set of progenitor nucleic acid sequence templates that serve as a basis for producing a progeny set of finalized chimeric polynucleotides. These parental oligonucleotide templates thus serve as a source of sequence information that aids in the design of the nucleic acid building blocks that are to be mutagenized, e.g., chimerized or shuffled. In one aspect of this method, the sequences of a plurality of parental nucleic acid templates are aligned in order to select one or more demarcation points. The demarcation points can be located at an area of homology, and are comprised of one or more nucleotides. These demarcation points are in one aspect shared by at least two of the progenitor templates. The demarcation points can thereby be used to delineate the boundaries of oligonucleotide building blocks to be generated in order to rearrange the parental polynucleotides. The demarcation points identified and selected in the progenitor molecules serve as potential chimerization points in the assembly of the final chimeric progeny molecules. A demarcation point can be an area of homology (comprised of at least one homologous nucleotide base) shared by at least two parental polynucleotide sequences. Alternatively, a demarcation point can be an area of homology that is shared by at least half of the parental polynucleotide sequences, or, it can be an area of homology that is shared by at least two thirds of the parental polynucleotide sequences. Even more in one aspect a serviceable demarcation points is an area of homology that is shared by at least three fourths of the parental polynucleotide sequences, or, it can be shared by at almost all of the parental polynucleotide sequences. In one aspect, a demarcation point is an area of homology that is shared by all of the parental polynucleotide sequences.

[0408] In one aspect, a ligation reassembly process is performed exhaustively in order to generate an exhaustive library of progeny chimeric polynucleotides. In other words, all possible ordered combinations of the nucleic acid building blocks are represented in the set of finalized chimeric nucleic acid molecules. At the same time, in another aspect, the assembly order (i.e. the order of assembly of each building block in the 5′ to 3 sequence of each finalized chimeric nucleic acid) in each combination is by design (or non-stochastic) as described above. Because of the non-stochastic nature of this invention, the possibility of unwanted side products is greatly reduced.

[0409] In another aspect, the ligation reassembly method is performed systematically. For example, the method is performed in order to generate a systematically compartmentalized library of progeny molecules, with compartments that can be screened systematically, e.g. one by one. In other words this invention provides that, through the selective and judicious use of specific nucleic acid building blocks, coupled with the selective and judicious use of sequentially stepped assembly reactions, a design can be achieved where specific sets of progeny products are made in each of several reaction vessels. This allows a systematic examination and screening procedure to be performed. Thus, these methods allow a potentially very large number of progeny molecules to be examined systematically in smaller groups. Because of its ability to perform chimerizations in a manner that is highly flexible yet exhaustive and systematic as well, particularly when there is a low level of homology among the progenitor molecules, these methods provide for the generation of a library (or set) comprised of a large number of progeny molecules. Because of the non-stochastic nature of the instant ligation reassembly invention, the progeny molecules generated in one aspect comprise a library of finalized chimeric nucleic acid molecules having an overall assembly order that is chosen by design. The saturation mutagenesis and optimized directed evolution methods also can be used to generate different progeny molecular species. It is appreciated that the invention provides freedom of choice and control regarding the selection of demarcation points, the size and number of the nucleic acid building blocks, and the size and design of the couplings. It is appreciated, furthermore, that the requirement for intermolecular homology is highly relaxed for the operability of this invention. In fact, demarcation points can even be chosen in areas of little or no intermolecular homology. For example, because of codon wobble, i.e. the degeneracy of codons, nucleotide substitutions can be introduced into nucleic acid building blocks without altering the amino acid originally encoded in the corresponding progenitor template. Alternatively, a codon can be altered such that the coding for an originally amino acid is altered. This invention provides that such substitutions can be introduced into the nucleic acid building block in order to increase the incidence of intermolecular homologous demarcation points and thus to allow an increased number of couplings to be achieved among the building blocks, which in turn allows a greater number of progeny chimeric molecules to be generated.

[0410] Synthetic Gene Reassembly

[0411] In one aspect, the present invention provides a non-stochastic method termed synthetic gene reassembly, that is somewhat related to stochastic shuffling, save that the nucleic acid building blocks are not shuffled or concatenated or chimerized randomly, but rather are assembled non-stochastically. See, e.g., U.S. Pat. No. 6,537,776.

[0412] The synthetic gene reassembly method does not depend on the presence of a high level of homology between polynucleotides to be shuffled. The invention can be used to non-stochastically generate libraries (or sets) of progeny molecules comprised of over 10¹⁰⁰ different chimeras. Conceivably, synthetic gene reassembly can even be used to generate libraries comprised of over 10¹⁰⁰⁰ different progeny chimeras.

[0413] Thus, in one aspect, the invention provides a non-stochastic method of producing a set of finalized chimeric nucleic acid molecules having an overall assembly order that is chosen by design, which method is comprised of the steps of generating by design a plurality of specific nucleic acid building blocks having serviceable mutually compatible ligatable ends and assembling these nucleic acid building blocks, such that a designed overall assembly order is achieved.

[0414] The mutually compatible ligatable ends of the nucleic acid building blocks to be assembled are considered to be “serviceable” for this type of ordered assembly if they enable the building blocks to be coupled in predetermined orders. Thus, in one aspect, the overall assembly order in which the nucleic acid building blocks can be coupled is specified by the design of the ligatable ends and, if more than one assembly step is to be used, then the overall assembly order in which the nucleic acid building blocks can be coupled is also specified by the sequential order of the assembly step(s). In a one aspect of the invention, the annealed building pieces are treated with an enzyme, such as a ligase (e.g., T4 DNA ligase) to achieve covalent bonding of the building pieces.

[0415] In a another aspect, the design of nucleic acid building blocks is obtained upon analysis of the sequences of a set of progenitor nucleic acid templates that serve as a basis for producing a progeny set of finalized chimeric nucleic acid molecules. These progenitor nucleic acid templates thus serve as a source of sequence information that aids in the design of the nucleic acid building blocks that are to be mutagenized, i.e. chimerized or shuffled.

[0416] In one exemplification, the invention provides for the chimerization of a family of related genes and their encoded family of related products. In a particular exemplification, the encoded products are enzymes. The lignocellulosic enzyme, e.g., glycosyl hydrolase, cellulase, endoglucanase, cellobiohydrolase, beta-glucosidase, xylanase, mannanse, β-xylosidase and/or arabinofuranosidase enzymes of the present invention can be mutagenized in accordance with the methods described herein.

[0417] Thus according to one aspect of the invention, the sequences of a plurality of progenitor nucleic acid templates (e.g., polynucleotides of the invention) are aligned in order to select one or more demarcation points, which demarcation points can be located at an area of homology. The demarcation points can be used to delineate the boundaries of nucleic acid building blocks to be generated. Thus, the demarcation points identified and selected in the progenitor molecules serve as potential chimerization points in the assembly of the progeny molecules.

[0418] In one aspect, a serviceable demarcation point is an area of homology (comprised of at least one homologous nucleotide base) shared by at least two progenitor templates, but the demarcation point can be an area of homology that is shared by at least half of the progenitor templates, at least two thirds of the progenitor templates, at least three fourths of the progenitor templates and in one aspect at almost all of the progenitor templates. Even more in one aspect still a serviceable demarcation point is an area of homology that is shared by all of the progenitor templates.

[0419] In a one aspect, the gene reassembly process is performed exhaustively in order to generate an exhaustive library. In other words, all possible ordered combinations of the nucleic acid building blocks are represented in the set of finalized chimeric nucleic acid molecules. At the same time, the assembly order (i.e. the order of assembly of each building block in the 5′ to 3 sequence of each finalized chimeric nucleic acid) in each combination is by design (or non-stochastic). Because of the non-stochastic nature of the method, the possibility of unwanted side products is greatly reduced.

[0420] In another aspect, the method provides that the gene reassembly process is performed systematically, for example to generate a systematically compartmentalized library, with compartments that can be screened systematically, e.g., one by one. In other words the invention provides that, through the selective and judicious use of specific nucleic acid building blocks, coupled with the selective and judicious use of sequentially stepped assembly reactions, an experimental design can be achieved where specific sets of progeny products are made in each of several reaction vessels. This allows a systematic examination and screening procedure to be performed. Thus, it allows a potentially very large number of progeny molecules to be examined systematically in smaller groups.

[0421] Because of its ability to perform chimerizations in a manner that is highly flexible yet exhaustive and systematic as well, particularly when there is a low level of homology among the progenitor molecules, the instant invention provides for the generation of a library (or set) comprised of a large number of progeny molecules. Because of the non-stochastic nature of the instant gene reassembly invention, the progeny molecules generated in one aspect comprise a library of finalized chimeric nucleic acid molecules having an overall assembly order that is chosen by design. In a particularly aspect, such a generated library is comprised of greater than 10³ to greater than 10¹⁰⁰⁰ different progeny molecular species.

[0422] In one aspect, a set of finalized chimeric nucleic acid molecules, produced as described is comprised of a polynucleotide encoding a polypeptide. According to one aspect, this polynucleotide is a gene, which may be a man-made gene. According to another aspect, this polynucleotide is a gene pathway, which may be a man-made gene pathway. The invention provides that one or more man-made genes generated by the is invention may be incorporated into a man-made gene pathway, such as pathway operable in a eukaryotic organism (including a plant).

[0423] In another exemplification, the synthetic nature of the step in which the building blocks are generated allows the design and introduction of nucleotides (e.g., one or more nucleotides, which may be, for example, codons or introns or regulatory sequences) that can later be optionally removed in an in vitro process (e.g., by mutagenesis) or in an in vivo process (e.g., by utilizing the gene splicing ability of a host organism). It is appreciated that in many instances the introduction of these nucleotides may also be desirable for many other reasons in addition to the potential benefit of creating a serviceable demarcation point.

[0424] Thus, according to another aspect, the invention provides that a nucleic acid building block can be used to introduce an intron. Thus, the invention provides that functional introns may be introduced into a man-made gene of the invention. The invention also provides that functional introns may be introduced into a man-made gene pathway of the invention. Accordingly, the invention provides for the generation of a chimeric polynucleotide that is a man-made gene containing one (or more) artificially introduced intron(s).

[0425] The invention also provides for the generation of a chimeric polynucleotide that is a man-made gene pathway containing one (or more) artificially introduced intron(s). In one aspect, the artificially introduced intron(s) are functional in one or more host cells for gene splicing much in the way that naturally-occurring introns serve functionally in gene splicing. The invention provides a process of producing man-made intron-containing polynucleotides to be introduced into host organisms for recombination and/or splicing.

[0426] A man-made gene produced using the invention can also serve as a substrate for recombination with another nucleic acid. Likewise, a man-made gene pathway produced using the invention can also serve as a substrate for recombination with another nucleic acid. In one aspect, the recombination is facilitated by, or occurs at, areas of homology between the man-made, intron-containing gene and a nucleic acid, which serves as a recombination partner. In one aspect, the recombination partner may also be a nucleic acid generated by the invention, including a man-made gene or a man-made gene pathway. Recombination may be facilitated by or may occur at areas of homology that exist at the one (or more) artificially introduced intron(s) in the man-made gene.

[0427] In one aspect, the synthetic gene reassembly method of the invention utilizes a plurality of nucleic acid building blocks, each of which in one aspect has two ligatable ends. The two ligatable ends on each nucleic acid building block may be two blunt ends (i.e. each having an overhang of zero nucleotides), or in one aspect one blunt end and one overhang, or more in one aspect still two overhangs. In one aspect, a useful overhang for this purpose may be a 3′ overhang or a 5′ overhang. Thus, a nucleic acid building block may have a 3′ overhang or alternatively a 5′ overhang or alternatively two 3′ overhangs or alternatively two 5′ overhangs. The overall order in which the nucleic acid building blocks are assembled to form a finalized chimeric nucleic acid molecule is determined by purposeful experimental design and is not random.

[0428] In one aspect, a nucleic acid building block is generated by chemical synthesis of two single-stranded nucleic acids (also referred to as single-stranded oligos) and contacting them so as to allow them to anneal to form a double-stranded nucleic acid building block. A double-stranded nucleic acid building block can be of variable size. The sizes of these building blocks can be small or large. Exemplary sizes for building block range from 1 base pair (not including any overhangs) to 100,000 base pairs (not including any overhangs). Other exemplary size ranges are also provided, which have lower limits of from 1 by to 10,000 by (including every integer value in between) and upper limits of from 2 by to 100,000 by (including every integer value in between).

[0429] Many methods exist by which a double-stranded nucleic acid building block can be generated that is serviceable for the invention; and these are known in the art and can be readily performed by the skilled artisan. According to one aspect, a double-stranded nucleic acid building block is generated by first generating two single stranded nucleic acids and allowing them to anneal to form a double-stranded nucleic acid building block.

[0430] The two strands of a double-stranded nucleic acid building block may be complementary at every nucleotide apart from any that form an overhang; thus containing no mismatches, apart from any overhang(s). According to another aspect, the two strands of a double-stranded nucleic acid building block are complementary at fewer than every nucleotide apart from any that form an overhang. Thus, according to this aspect, a double-stranded nucleic acid building block can be used to introduce codon degeneracy. In one aspect the codon degeneracy is introduced using the site-saturation mutagenesis described herein, using one or more N,N,G/T cassettes or alternatively using one or more N,N,N cassettes.

[0431] The in vivo recombination method of the invention can be performed blindly on a pool of unknown hybrids or alleles of a specific polynucleotide or sequence. However, it is not necessary to know the actual DNA or RNA sequence of the specific polynucleotide. The approach of using recombination within a mixed population of genes can be useful for the generation of any useful proteins, for example, a cellulase of the invention or a variant thereof. This approach may be used to generate proteins having altered specificity or activity. The approach may also be useful for the generation of hybrid nucleic acid sequences, for example, promoter regions, introns, exons, enhancer sequences, 31 untranslated regions or 51 untranslated regions of genes. Thus this approach may be used to generate genes having increased rates of expression. This approach may also be useful in the study of repetitive DNA sequences. Finally, this approach may be useful to make ribozymes or aptamers of the invention.

[0432] In one aspect the invention described herein is directed to the use of repeated cycles of reductive reassortment, recombination and selection which allow for the directed molecular evolution of highly complex linear sequences, such as DNA, RNA or proteins thorough recombination.

[0433] Optimized Directed Evolution System

[0434] The invention provides a non-stochastic gene modification system termed “optimized directed evolution system” to generate polypeptides, e.g., the lignocellulosic enzyme, e.g., glycosyl hydrolase, cellulase, endoglucanase, cellobiohydrolase, beta-glucosidase, xylanase, mannanse, β-xylosidase and/or arabinofuranosidase enzymes or antibodies of the invention, with new or altered properties. In one aspect, optimized directed evolution is directed to the use of repeated cycles of reductive reassortment, recombination and selection that allow for the directed molecular evolution of nucleic acids through recombination.

[0435] Optimized directed evolution allows generation of a large population of evolved chimeric sequences, wherein the generated population is significantly enriched for sequences that have a predetermined number of crossover events. A crossover event is a point in a chimeric sequence where a shift in sequence occurs from one parental variant o to another parental variant. Such a point is normally at the juncture of where oligonucleotides from two parents are ligated together to form a single sequence. This method allows calculation of the correct concentrations of oligonucleotide sequences so that the final chimeric population of sequences is enriched for the chosen number of crossover events. This provides more control over choosing chimeric variants having a predetermined number of crossover events.

[0436] In addition, this method provides a convenient means for exploring a tremendous amount of the possible protein variant space in comparison to other systems. Previously, if one generated, for example, 10¹³ chimeric molecules during a reaction, it would be extremely difficult to test such a high number of chimeric variants for a particular activity. Moreover, a significant portion of the progeny population would have a very high number of crossover events which resulted in proteins that were less likely to have increased levels of a particular activity. By using these methods, the population of chimerics molecules can be enriched for those variants that have a particular number of crossover events. Thus, although one can still generate 10¹³ chimeric molecules during a reaction, each of the molecules chosen for further analysis most likely has, for example, only three crossover events. Because the resulting progeny population can be skewed to have a predetermined number of crossover events, the boundaries on the functional variety between the chimeric molecules is reduced. This provides a more manageable number of variables when calculating which oligonucleotide from the original parental polynucleotides might be responsible for affecting a particular trait.

[0437] One method for creating a chimeric progeny polynucleotide sequence is to create oligonucleotides corresponding to fragments or portions of each parental sequence. Each oligonucleotide in one aspect includes a unique region of overlap so that mixing the oligonucleotides together results in a new variant that has each oligonucleotide fragment assembled in the correct order. Alternatively protocols for practicing these methods of the invention can be found in U.S. Pat. Nos. 6,773,900; 6,740,506; 6,713,282; 6,635,449; 6,605,449; 6,537,776; 6,361,974.

[0438] The number of oligonucleotides generated for each parental variant bears a relationship to the total number of resulting crossovers in the chimeric molecule that is ultimately created. For example, three parental nucleotide sequence variants might be provided to undergo a ligation reaction in order to find a chimeric variant having, for example, greater activity at high temperature. As one example, a set of 50 oligonucleotide sequences can be generated corresponding to each portions of each parental variant. Accordingly, during the ligation reassembly process there could be up to 50 crossover events within each of the chimeric sequences. The probability that each of the generated chimeric polynucleotides will contain oligonucleotides from each parental variant in alternating order is very low. If each oligonucleotide fragment is present in the ligation reaction in the same molar quantity it is likely that in some positions oligonucleotides from the same parental polynucleotide will ligate next to one another and thus not result in a crossover event. If the concentration of each oligonucleotide from each parent is kept constant during any ligation step in this example, there is a ⅓ chance (assuming 3 parents) that an oligonucleotide from the same parental variant will ligate within the chimeric sequence and produce no crossover.

[0439] Accordingly, a probability density function (PDF) can be determined to predict the population of crossover events that are likely to occur during each step in a ligation reaction given a set number of parental variants, a number of oligonucleotides corresponding to each variant, and the concentrations of each variant during each step in the ligation reaction. The statistics and mathematics behind determining the PDF is described below. By utilizing these methods, one can calculate such a probability density function, and thus enrich the chimeric progeny population for a predetermined number of crossover events resulting from a particular ligation reaction. Moreover, a target number of crossover events can be predetermined, and the system then programmed to calculate the starting quantities of each parental oligonucleotide during each step in the ligation reaction to result in a probability density function that centers on the predetermined number of crossover events. These methods are directed to the use of repeated cycles of reductive reassortment, recombination and selection that allow for the directed molecular evolution of a nucleic acid encoding a polypeptide through recombination. This system allows generation of a large population of evolved chimeric sequences, wherein the generated population is significantly enriched for sequences that have a predetermined number of crossover events. A crossover event is a point in a chimeric sequence where a shift in sequence occurs from one parental variant to another parental variant. Such a point is normally at the juncture of where oligonucleotides from two parents are ligated together to form a single sequence. The method allows calculation of the correct concentrations of oligonucleotide sequences so that the final chimeric population of sequences is enriched for the chosen number of crossover events. This provides more control over choosing chimeric variants having a predetermined number of crossover events.

[0440] In addition, these methods provide a convenient means for exploring a tremendous amount of the possible protein variant space in comparison to other systems. By using the methods described herein, the population of chimerics molecules can be enriched for those variants that have a particular number of crossover events. Thus, although one can still generate 10¹³ chimeric molecules during a reaction, each of the molecules chosen for further analysis most likely has, for example, only three crossover events. Because the resulting progeny population can be skewed to have a predetermined number of crossover events, the boundaries on the functional variety between the chimeric molecules is reduced. This provides a more manageable number of variables when calculating which oligonucleotide from the original parental polynucleotides might be responsible for affecting a particular trait.

[0441] In one aspect, the method creates a chimeric progeny polynucleotide sequence by creating oligonucleotides corresponding to fragments or portions of each parental sequence. Each oligonucleotide in one aspect includes a unique region of overlap so that mixing the oligonucleotides together results in a new variant that has each oligonucleotide fragment assembled in the correct order. See also U.S. Pat. Nos. 6,773,900; 6,740,506; 6,713,282; 6,635,449; 6,605,449; 6,537,776; 6,361,974.

[0442] Determining Crossover Events

[0443] Aspects of the invention include a system and software that receive a desired crossover probability density function (PDF), the number of parent genes to be reassembled, and the number of fragments in the reassembly as inputs. The output of this program is a “fragment PDF” that can be used to determine a recipe for producing reassembled genes, and the estimated crossover PDF of those genes. The processing described herein is in one aspect performed in MATLAB™ (The Mathworks, Natick, Mass.) a programming language and development environment for technical computing.

[0444] Iterative Processes

[0445] Any process of the invention can be iteratively repeated, e.g., a nucleic acid encoding an altered or new cellulase phenotype, e.g., endoglucanase, cellobiohydrolase, beta-glucosidase, xylanase, mannanse, β-xylosidase and/or arabinofuranosidase enzyme of the invention, can be identified, re-isolated, again modified, re-tested for activity. This process can be iteratively repeated until a desired phenotype is engineered. For example, an entire biochemical anabolic or catabolic pathway can be engineered into a cell, including, e.g., the lignocellulosic enzyme activity.

[0446] Similarly, if it is determined that a particular oligonucleotide has no affect at all on the desired trait (e.g., a new the lignocellulosic enzyme, e.g., glycosyl hydrolase, cellulase, endoglucanase, cellobiohydrolase, beta-glucosidase, xylanase, mannanse, β-xylosidase and/or arabinofuranosidase enzyme phenotype), it can be removed as a variable by synthesizing larger parental oligonucleotides that include the sequence to be removed. Since incorporating the sequence within a larger sequence prevents any crossover events, there will no longer be any variation of this sequence in the progeny polynucleotides. This iterative practice of determining which oligonucleotides are most related to the desired trait, and which are unrelated, allows more efficient exploration all of the possible protein variants that might be provide a particular trait or activity.

[0447] In Vivo Shuffling

[0448] In various aspects, in vivo shuffling of molecules is used in methods of the invention to provide variants of polypeptides of the invention, e.g., antibodies of the invention or cellulases of the invention, e.g., endoglucanase, cellobiohydrolase, beta-glucosidase, xylanase, mannanse, β-xylosidase and/or arabinofuranosidase enzymes, and the like. In vivo shuffling can be performed utilizing the natural property of cells to recombine multimers. While recombination in vivo has provided the major natural route to molecular diversity, genetic recombination remains a relatively complex process that involves 1) the recognition of homologies; 2) strand cleavage, strand invasion, and metabolic steps leading to the production of recombinant chiasma; and finally 3) the resolution of chiasma into discrete recombined molecules. The formation of the chiasma requires the recognition of homologous sequences.

[0449] In another aspect, the invention includes a method for producing a hybrid polynucleotide from at least a first polynucleotide and a second polynucleotide. The invention can be used to produce a hybrid polynucleotide by introducing at least a first polynucleotide and a second polynucleotide (e.g., one, or both, being an exemplary the lignocellulosic enzyme, e.g., glycosyl hydrolase, cellulase, endoglucanase, cellobiohydrolase, beta-glucosidase, xylanase, mannanse, β-xylosidase and/or arabinofuranosidase enzyme-encoding sequence of the invention) which share at least one region of partial sequence homology into a suitable host cell. The regions of partial sequence homology promote processes which result in sequence reorganization producing a hybrid polynucleotide. The term “hybrid polynucleotide”, as used herein, is any nucleotide sequence which results from the method of the present invention and contains sequence from at least two original polynucleotide sequences. Such hybrid polynucleotides can result from intermolecular recombination events which promote sequence integration between DNA molecules. In addition, such hybrid polynucleotides can result from intramolecular reductive reassortment processes which utilize repeated sequences to alter a nucleotide sequence within a DNA molecule.

[0450] In one aspect, vivo reassortment focuses on “inter-molecular” processes collectively referred to as “recombination”; which in bacteria, is generally viewed as a “RecA-dependent” phenomenon. The invention can rely on recombination processes of a host cell to recombine and re-assort sequences, or the cells' ability to mediate reductive processes to decrease the complexity of quasi-repeated sequences in the cell by deletion. This process of “reductive reassortment” occurs by an “intra-molecular”, RecA-independent process.

[0451] In another aspect of the invention, novel polynucleotides can be generated by the process of reductive reassortment. The method involves the generation of constructs containing consecutive sequences (original encoding sequences), their insertion into an appropriate vector and their subsequent introduction into an appropriate host cell. The reassortment of the individual molecular identities occurs by combinatorial processes between the consecutive sequences in the construct possessing regions of homology, or between quasi-repeated units. The reassortment process recombines and/or reduces the complexity and extent of the repeated sequences and results in the production of novel molecular species. Various treatments may be applied to enhance the rate of reassortment. These could include treatment with ultra-violet light, or DNA damaging chemicals and/or the use of host cell lines displaying enhanced levels of “genetic instability”. Thus the reassortment process may involve homologous recombination or the natural property of quasi-repeated sequences to direct their own evolution.

[0452] Repeated or “quasi-repeated” sequences play a role in genetic instability. In one aspect, “quasi-repeats” are repeats that are not restricted to their original unit structure. Quasi-repeated units can be presented as an array of sequences in a construct; consecutive units of similar sequences. Once ligated, the junctions between the consecutive sequences become essentially invisible and the quasi-repetitive nature of the resulting construct is now continuous at the molecular level. The deletion process the cell performs to reduce the complexity of the resulting construct operates between the quasi-repeated sequences. The quasi-repeated units provide a practically limitless repertoire of templates upon which slippage events can occur. In one aspect, the constructs containing the quasi-repeats thus effectively provide sufficient molecular elasticity that deletion (and potentially insertion) events can occur virtually anywhere within the quasi-repetitive units.

[0453] When the quasi-repeated sequences are all ligated in the same orientation, for instance head to tail or vice versa, the cell cannot distinguish individual units. Consequently, the reductive process can occur throughout the sequences. In contrast, when for example, the units are presented head to head, rather than head to tail, the inversion delineates the endpoints of the adjacent unit so that deletion formation will favor the loss of discrete units. Thus, it is preferable with the present method that the sequences are in the same orientation. Random orientation of quasi-repeated sequences will result in the loss of reassortment efficiency, while consistent orientation of the sequences will offer the highest efficiency. However, while having fewer of the contiguous sequences in the same orientation decreases the efficiency, it may still provide sufficient elasticity for the effective recovery of novel molecules. Constructs can be made with the quasi-repeated sequences in the same orientation to allow higher efficiency.

[0454] Sequences can be assembled in a head to tail orientation using any of a variety of methods, including the following:
[0455] a) Primers that include a poly-A head and poly-T tail which when made single-stranded would provide orientation can be utilized. This is accomplished by having the first few bases of the primers made from RNA and hence easily removed RNaseH.
[0456] b) Primers that include unique restriction cleavage sites can be utilized. Multiple sites, a battery of unique sequences and repeated synthesis and ligation steps would be required.
[0457] c) The inner few bases of the primer could be thiolated and an exonuclease used to produce properly tailed molecules.

[0458] In one aspect, the recovery of the re-assorted sequences relies on the identification of cloning vectors with a reduced repetitive index (RI). The re-assorted encoding sequences can then be recovered by amplification. The products are re-cloned and expressed. The recovery of cloning vectors with reduced RI can be affected by:
[0459] 1) The use of vectors only stably maintained when the construct is reduced in complexity.
[0460] 2) The physical recovery of shortened vectors by physical procedures. In this case, the cloning vector would be recovered using standard plasmid isolation procedures and size fractionated on either an agarose gel, or column with a low molecular weight cut off utilizing standard procedures.
[0461] 3) The recovery of vectors containing interrupted genes which can be selected when insert size decreases.
[0462] 4) The use of direct selection techniques with an expression vector and the appropriate selection.

[0463] Encoding sequences (for example, genes) from related organisms may demonstrate a high degree of homology and encode quite diverse protein products. These types of sequences are particularly useful in the present invention as quasi-repeats. However, while the examples illustrated below demonstrate the reassortment of nearly identical original encoding sequences (quasi-repeats), this process is not limited to such nearly identical repeats.

[0464] The following example demonstrates an exemplary method of the invention. Encoding nucleic acid sequences (quasi-repeats) derived from three (3) unique species are described. Each sequence encodes a protein with a distinct set of properties. Each of the sequences differs by a single or a few base pairs at a unique position in the sequence. The quasi-repeated sequences are separately or collectively amplified and ligated into random assemblies such that all possible permutations and combinations are available in the population of ligated molecules. The number of quasi-repeat units can be controlled by the assembly conditions. The average number of quasi-repeated units in a construct is defined as the repetitive index (RI).

[0465] Once formed, the constructs may, or may not be size fractionated on an agarose gel according to published protocols, inserted into a cloning vector and transfected into an appropriate host cell. The cells are then propagated and “reductive reassortment” is effected. The rate of the reductive reassortment process may be stimulated by the introduction of DNA damage if desired. Whether the reduction in RI is mediated by deletion formation between repeated sequences by an “intra-molecular” mechanism, or mediated by recombination-like events through “inter-molecular” mechanisms is immaterial. The end result is a reassortment of the molecules into all possible combinations.

[0466] Optionally, the method comprises the additional step of screening the library members of the shuffled pool to identify individual shuffled library members having the ability to bind or otherwise interact, or catalyze a particular reaction (e.g., such as catalytic domain of an enzyme) with a predetermined macromolecule, such as for example a proteinaceous receptor, an oligosaccharide, virion, or other predetermined compound or structure.

[0467] The polypeptides that are identified from such libraries can be used for therapeutic, diagnostic, research and related purposes (e.g., catalysts, solutes for increasing osmolarity of an aqueous solution and the like) and/or can be subjected to one or more additional cycles of shuffling and/or selection.

[0468] In another aspect, it is envisioned that prior to or during recombination or reassortment, polynucleotides generated by the method of the invention can be subjected to agents or processes which promote the introduction of mutations into the original polynucleotides. The introduction of such mutations would increase the diversity of resulting hybrid polynucleotides and polypeptides encoded therefrom. The agents or processes which promote mutagenesis can include, but are not limited to: (+)-CC-1065, or a synthetic analog such as (+)-CC-1065-(N3-Adenine (See Sun and Hurley, (1992); an N-acetylated or deacetylated 4′-fluro-4-aminobiphenyl adduct capable of inhibiting DNA synthesis (See, for example, van de Poll et al. (1992)); or a N-acetylated or deacetylated 4-aminobiphenyl adduct capable of inhibiting DNA synthesis (See also, van de Poll et al. (1992), pp. 751-758); trivalent chromium, a trivalent chromium salt, a polycyclic aromatic hydrocarbon (PAH) DNA adduct capable of inhibiting DNA replication, such as 7-bromomethyl-benz[a]anthracene (“BMA”), tris(2,3-dibromopropyl)phosphate (“Tris-BP”), 1,2-dibromo-3-chloropropane (“DBCP”), 2-bromoacrolein (2BA), benzo[a]pyrene-7,8-dihydrodiol-9-10-epoxide (“BPDE”), a platinum(II) halogen salt, N-hydroxy-2-amino-3-methylimidazo[4,5-f]-quinoline (“N-hydroxy-IQ”) and N-hydroxy-2-amino-1-methyl-6-phenylimidazo[4,5-f]-pyridine (“N-hydroxy-PhIP”). Exemplary means for slowing or halting PCR amplification consist of UV light (+)-CC-1065 and (+)-CC-1065-(N3-Adenine). Particularly encompassed means are DNA adducts or polynucleotides comprising the DNA adducts from the polynucleotides or polynucleotides pool, which can be released or removed by a process including heating the solution comprising the polynucleotides prior to further processing.

[0469] In another aspect the invention is directed to a method of producing recombinant proteins having biological activity by treating a sample comprising double-stranded template polynucleotides encoding a wild-type protein under conditions according to the invention which provide for the production of hybrid or re-assorted polynucleotides.

[0470] Producing Sequence Variants

[0471] The invention also provides additional methods for making sequence variants of the nucleic acid (e.g., the lignocellulosic enzyme, e.g., glycosyl hydrolase, cellulase, endoglucanase, cellobiohydrolase, beta-glucosidase, xylanase, mannanse, β-xylosidase and/or arabinofuranosidase enzyme) sequences of the invention. The invention also provides additional methods for isolating the lignocellulosic enzymes using the nucleic acids and polypeptides of the invention. In one aspect, the invention provides for variants of a lignocellulosic enzyme coding sequence (e.g., a gene, cDNA or message) of the invention, which can be altered by any means, including, e.g., random or stochastic methods, or, non-stochastic, or “directed evolution,” methods, as described above.

[0472] The isolated variants may be naturally occurring. Variant can also be created in vitro. Variants may be created using genetic engineering techniques such as site directed mutagenesis, random chemical mutagenesis, Exonuclease III deletion procedures, and standard cloning techniques. Alternatively, such variants, fragments, analogs, or derivatives may be created using chemical synthesis or modification procedures. Other methods of making variants are also familiar to those skilled in the art. These include procedures in which nucleic acid sequences obtained from natural isolates are modified to generate nucleic acids which encode polypeptides having characteristics which enhance their value in industrial or laboratory applications. In such procedures, a large number of variant sequences having one or more nucleotide differences with respect to the sequence obtained from the natural isolate are generated and characterized. These nucleotide differences can result in amino acid changes with respect to the polypeptides encoded by the nucleic acids from the natural isolates.

[0473] For example, variants may be created using error prone PCR. In one aspect of error prone PCR, the PCR is performed under conditions where the copying fidelity of the DNA polymerase is low, such that a high rate of point mutations is obtained along the entire length of the PCR product. Error prone PCR is described, e.g., in Leung (1989) Technique 1:11-15) and Caldwell (1992) PCR Methods Applic. 2:28-33. Briefly, in such procedures, nucleic acids to be mutagenized are mixed with PCR primers, reaction buffer, MgCl₂, MnCl₂, Taq polymerase and an appropriate concentration of dNTPs for achieving a high rate of point mutation along the entire length of the PCR product. For example, the reaction may be performed using 20 fmoles of nucleic acid to be mutagenized, 30 pmole of each PCR primer, a reaction buffer comprising 50 mM KCl, 10 mM Tris HCl (pH 8.3) and 0.01% gelatin, 7 mM MgCl2, 0.5 mM MnCl₂, 5 units of Taq polymerase, 0.2 mM dGTP, 0.2 mM dATP, 1 mM dCTP, and 1 mM dTTP. PCR may be performed for 30 cycles of 94° C. for 1 min, 45° C. for 1 min, and 72° C. for 1 min. However, it will be appreciated that these parameters may be varied as appropriate. The Is mutagenized nucleic acids are cloned into an appropriate vector and the activities of the polypeptides encoded by the mutagenized nucleic acids are evaluated.

[0474] In one aspect, variants are created using oligonucleotide directed mutagenesis to generate site-specific mutations in any cloned DNA of interest. Oligonucleotide mutagenesis is described, e.g., in Reidhaar-Olson (1988) Science 241:53-57. Briefly, in such procedures a plurality of double stranded oligonucleotides bearing one or more mutations to be introduced into the cloned DNA are synthesized and inserted into the cloned DNA to be mutagenized. In one aspect, clones containing the mutagenized DNA are recovered, expressed, and the activities of the polypeptide encoded therein assessed.

[0475] Another method for generating variants is assembly PCR. Assembly PCR involves the assembly of a PCR product from a mixture of small DNA fragments. A large number of different PCR reactions occur in parallel in the same vial, with the products of one reaction priming the products of another reaction. Assembly PCR is described in, e.g., U.S. Pat. No. 5,965,408.

[0476] In one aspect, sexual PCR mutagenesis is an exemplary method of generating variants of the invention. In one aspect of sexual PCR mutagenesis forced homologous recombination occurs between DNA molecules of different but highly related DNA sequence in vitro, as a result of random fragmentation of the DNA molecule based on sequence homology, followed by fixation of the crossover by primer extension in a PCR reaction. Sexual PCR mutagenesis is described, e.g., in Stemmer (1994) Proc. Natl. Acad. Sci. USA 91:10747-10751. Briefly, in such procedures a plurality of nucleic acids to be recombined are digested with DNase to generate fragments having an average size of 50-200 nucleotides. Fragments of the desired average size are purified and resuspended in a PCR mixture. PCR is conducted under conditions which facilitate recombination between the nucleic acid fragments. For example, PCR may be performed by resuspending the purified fragments at a concentration of 10-30 ng/μl in a solution of 0.2 mM of each dNTP, 2.2 mM MgCl₂, 50 mM KCL, 10 mM Tris HCl, pH 9.0, and 0.1% Triton X-100. 2.5 units of Taq polymerase per 100:1 of reaction mixture is added and PCR is performed using the following regime: 94° C. for 60 seconds, 94° C. for 30 seconds, 50-55° C. for 30 seconds, 72° C. for 30 seconds (30-45 times) and 72° C. for 5 minutes. However, it will be appreciated that these parameters may be varied as appropriate. In some aspects, oligonucleotides may be included in the PCR reactions. In other aspects, the Klenow fragment of DNA polymerase I may be used in a first set of PCR reactions and Taq polymerase may be used in a subsequent set of PCR reactions. Recombinant sequences are isolated and the activities of the polypeptides they encode are assessed.

[0477] In one aspect, variants are created by in vivo mutagenesis. In some aspects, random mutations in a sequence of interest are generated by propagating the sequence of interest in a bacterial strain, such as an E. coli strain, which carries mutations in one or more of the DNA repair pathways. Such “mutator” strains have a higher random mutation rate than that of a wild-type parent. Propagating the DNA in one of these strains will eventually generate random mutations within the DNA. Mutator strains suitable for use for in vivo mutagenesis are described in PCT Publication No. WO 91/16427, published Oct. 31, 1991, entitled “Methods for Phenotype Creation from Multiple Gene Populations”.

[0478] Variants may also be generated using cassette mutagenesis. In cassette mutagenesis a small region of a double stranded DNA molecule is replaced with a synthetic oligonucleotide “cassette” that differs from the native sequence. The oligonucleotide often contains completely and/or partially randomized native sequence. Recursive ensemble mutagenesis may also be used to generate variants.

[0479] Recursive ensemble mutagenesis is an algorithm for protein engineering (protein mutagenesis) developed to produce diverse populations of phenotypically related mutants whose members differ in amino acid sequence. This method uses a feedback mechanism to control successive rounds of combinatorial cassette mutagenesis. Recursive ensemble mutagenesis is described, e.g., in Arkin (1992) Proc. Natl. Acad. Sci. USA 89:7811-7815.

[0480] In some aspects, variants are created using exponential ensemble mutagenesis. Exponential ensemble mutagenesis is a process for generating combinatorial libraries with a high percentage of unique and functional mutants, wherein small groups of residues are randomized in parallel to identify, at each altered position, amino acids which lead to functional proteins. Exponential ensemble mutagenesis is described, e.g., in Delegrave (1993) Biotechnology Res. 11:1548-1552. Random and site-directed mutagenesis are described, e.g., in Arnold (1993) Current Opinion in Biotechnology 4:450-455.

[0481] In some aspects, the variants are created using shuffling procedures wherein portions of a plurality of nucleic acids which encode distinct polypeptides are fused together to create chimeric nucleic acid sequences which encode chimeric polypeptides as described in U.S. Pat. No. 5,965,408, filed Jul. 9, 1996, entitled, “Method of DNA Reassembly by Interrupting Synthesis” and U.S. Pat. No. 5,939,250, filed May 22, 1996, entitled, “Production of Enzymes Having Desired Activities by Mutagenesis.

[0482] The variants of the polypeptides of the invention may be variants in which one or more of the amino acid residues of the polypeptides of the sequences of the invention are substituted with a conserved or non-conserved amino acid residue (in one aspect a conserved amino acid residue); and such substituted amino acid residue may or may not be one encoded by the genetic code (e.g., the substitution may use a synthetic residue).

[0483] In one aspect, conservative substitutions are those that substitute a given amino acid in a polypeptide by another amino acid of like characteristics. In one aspect, conservative substitutions of the invention comprise the following replacements: replacements of an aliphatic amino acid such as Alanine, Valine, Leucine and Isoleucine with another aliphatic amino acid; replacement of a Serine with a Threonine or vice versa; replacement of an acidic residue such as Aspartic acid and Glutamic acid with another acidic residue; replacement of a residue bearing an amide group, such as Asparagine and Glutamine, with another residue bearing an amide group; exchange of a basic residue such as Lysine and Arginine with another basic residue; and replacement of an aromatic residue such as Phenylalanine, Tyrosine with another aromatic residue.

[0484] Other variants are those in which one or more of the amino acid residues of a polypeptide of the invention includes a substituent group. In one aspect, other variants are those in which the polypeptide is associated with another compound, such as a compound to increase the half-life of the polypeptide (for example, polyethylene glycol). Additional variants are those in which additional amino acids are fused to the polypeptide, such as a leader sequence, a secretory sequence, a proprotein sequence or a sequence which facilitates purification, enrichment, or stabilization of the polypeptide.

[0485] In some aspects, the fragments, derivatives and analogs retain the same biological function or activity as the polypeptides of the invention. In other aspects, the fragment, derivative, or analog includes a proprotein, such that the fragment, derivative, or analog can be activated by cleavage of the proprotein portion to produce an active polypeptide.

[0486] Optimizing Codons to Achieve High Levels of Protein Expression in Host Cells

[0487] The invention provides methods for modifying the lignocellulosic enzyme, e.g., glycosyl hydrolase, cellulase, endoglucanase, cellobiohydrolase, beta-glucosidase, xylanase, mannanse, β-xylosidase and/or arabinofuranosidase, enzyme-encoding nucleic acids to modify (e.g., optimize) codon usage. In one aspect, the invention provides methods for modifying codons in a nucleic acid encoding a lignocellulosic enzyme to increase or decrease its expression in a host cell. The invention also provides nucleic acids encoding a lignocellulosic enzyme modified to increase its expression in a host cell, the lignocellulosic enzyme so modified, and methods of making the modified the lignocellulosic enzymes. The method comprises identifying a “non-preferred” or a “less preferred” codon in the lignocellulosic enzyme-encoding nucleic acid and replacing one or more of these non-preferred or less preferred codons with a “preferred codon” encoding the same amino acid as the replaced codon and at least one non-preferred or less preferred codon in the nucleic acid has been replaced by a preferred codon encoding the same amino acid. A preferred codon is a codon over-represented in coding sequences in genes in the host cell and a non-preferred or less preferred codon is a codon under-represented in coding sequences in genes in the host cell.

[0488] Host cells for expressing the nucleic acids, expression cassettes and vectors of the invention include bacteria, yeast, fungi, plant cells, insect cells and mammalian cells (see discussion, above). Thus, the invention provides methods for optimizing codon usage in all of these cells, codon-altered nucleic acids and polypeptides made by the codon-altered nucleic acids. Exemplary host cells include bacteria, such as any species of Escherichia, Lactococcus, Salmonella, Streptomyces, Pseudomonas, Staphylococcus or Bacillus, including, e.g., Escherichia coli, Lactococcus lactis, Lactobacillus gasseri, Lactococcus cremoris, Bacillus subtilis, Bacillus cereus, Salmonella typhimurium, Pseudomonas fluorescens. Exemplary host cells also include eukaryotic organisms, e.g., various fungi such as yeasts, e.g. any species of Pichia, Saccharomyces, Schizosaccharomyces, Kluyveromyces, Hansenula, Aspergillus or Schwanniomyces, including Pichia pastoris, Saccharomyces cerevisiae, Schizosaccharomyces pombe, Kluvveromyces lactis, Hansenula polymorpha, or filamentous fungi, e.g. Trichoderma, Aspergillus sp., including Aspergillus niger, and mammalian cells and cell lines and insect cells and cell lines. Thus, the invention also includes nucleic acids and polypeptides optimized for expression in these organisms and species.

[0489] For example, the codons of a nucleic acid encoding a lignocellulosic enzyme, e.g., a glycosyl hydrolase, cellulase, endoglucanase, cellobiohydrolase, beta-glucosidase, xylanase, mannanse, β-xylosidase and/or arabinofuranosidase enzyme isolated from a bacterial cell are modified such that the nucleic acid is optimally expressed in a bacterial cell different from the bacteria from which the lignocellulosic enzyme was derived, a yeast, a fungi, a plant cell, an insect cell or a mammalian cell. Methods for optimizing codons are well known in the art, see, e.g., U.S. Pat. No. 5,795,737; Baca (2000) Int. J. Parasitol. 30:113-118; Hale (1998) Protein Expr. Purif. 12:185-188; Narum (2001) Infect. Immun. 69:7250-7253. See also Narum (2001) Infect. Immun. 69:7250-7253, describing optimizing codons in mouse systems; Outchkourov (2002) Protein Expr. Purif. 24:18-24, describing optimizing codons in yeast; Feng (2000) Biochemistry 39:15399-15409, describing optimizing codons in E. coli; Humphreys (2000) Protein Expr. Purif. 20:252-264, describing optimizing codon usage that affects secretion in E. coli.

### Transgenic Non-Human Animals

[0490] The invention provides transgenic non-human animals comprising a nucleic acid, a polypeptide (e.g., a lignocellulosic enzyme, e.g., a glycosyl hydrolase, cellulase, endoglucanase, cellobiohydrolase, beta-glucosidase, xylanase, mannanse, β-xylosidase and/or arabinofuranosidase enzyme), an expression cassette or vector or a transfected or transformed cell of the invention. The invention also provides methods of making and using these transgenic non-human animals.

[0491] The transgenic non-human animals can be, e.g., dogs, goats, rabbits, sheep, pigs (including all swine, hogs and related animals), cows, rats and mice, comprising the nucleic acids of the invention. These animals can be used, e.g., as in vivo models to study the lignocellulosic enzyme, e.g., glycosyl hydrolase, cellulase, endoglucanase, cellobiohydrolase, beta-glucosidase, xylanase, mannanse, β-xylosidase and/or arabinofuranosidase enzyme activity, or, as models to screen for agents that change the lignocellulosic enzyme activity in vivo. The coding sequences for the polypeptides to be expressed in the transgenic non-human animals can be designed to be constitutive, or, under the control of tissue-specific, developmental-specific or inducible transcriptional regulatory factors.

[0492] Transgenic non-human animals can be designed and generated using any method known in the art; see, e.g., U.S. Pat. Nos. 6,211,428; 6,187,992; 6,156,952; 6,118,044; 6,111,166; 6,107,541; 5,959,171; 5,922,854; 5,892,070; 5,880,327; 5,891,698; 5,639,940; 5,573,933; 5,387,742; 5,087,571, describing making and using transformed cells and eggs and transgenic mice, rats, rabbits, sheep, pigs and cows. See also, e.g., Pollock (1999) J. Immunol. Methods 231:147-157, describing the production of recombinant proteins in the milk of transgenic dairy animals; Baguisi (1999) Nat. Biotechnol. 17:456-461, demonstrating the production of transgenic goats. U.S. Pat. No. 6,211,428, describes making and using transgenic non-human mammals which express in their brains a nucleic acid construct comprising a DNA sequence. U.S. Pat. No. 5,387,742, describes injecting cloned recombinant or synthetic DNA sequences into fertilized mouse eggs, implanting the injected eggs in pseudo-pregnant females, and growing to term transgenic mice. U.S. Pat. No. 6,187,992, describes making and using a transgenic mouse.

[0493] “Knockout animals” can also be used to practice the methods of the invention. For example, in one aspect, the transgenic or modified animals of the invention comprise a “knockout animal,” e.g., a “knockout mouse,” engineered not to express an endogenous gene, which is replaced with a gene expressing a lignocellulosic enzyme, e.g., a glycosyl hydrolase, cellulase, endoglucanase, cellobiohydrolase, beta-glucosidase, xylanase, mannanse, β-xylosidase and/or arabinofuranosidase enzyme of the invention, or, a fusion protein comprising a lignocellulosic enzyme of the invention.

### Transgenic Plants and Seeds

[0494] The invention provides transgenic plants and seeds (and plant parts derived therefrom, including, e.g., fruit, roots, etc.) comprising a nucleic acid, a polypeptide (e.g., a lignocellulosic enzyme, e.g., a glycosyl hydrolase, cellulase, endoglucanase, cellobiohydrolase, beta-glucosidase, xylanase, mannanse, β-xylosidase and/or arabinofuranosidase enzyme), an expression cassette, vector, and/or a transfected or transformed cell of the invention.

[0495] The invention provides transformed, transduced, infected and transgenic plants comprising a nucleic acid of the invention, and uses these plants to practice the invention, e.g., to generate a biofuel and/or an alcohol or sugar from the plant or plant part, including whole plants, plant waste, plant by-products, plant parts (e.g., leaves, stems, flowers, roots, etc.), plant protoplasts, seeds and plant cells and progeny and cell cultures of same. In one aspect, the classes of plants used to practice this invention, including the cells and plants and methods of the invention, is as broad as the class of higher plants amenable to transformation techniques, including angiosperms (monocotyledonous (monocot) and dicotyledonous (dicot) plants), as well as gymnosperms; including plants of a variety of ploidy levels, including polyploid, diploid, haploid and hemizygous states.

[0496] The invention also provides plant products, e.g., oils, seeds, roots, leaves, extracts, fruit, pulp, pollen and the like, and/or straw or hay and the like, comprising a nucleic acid and/or a polypeptide of the invention. The transgenic plant can be dicotyledonous (a dicot) or monocotyledonous (a monocot). The invention also provides methods of making and using these transgenic plants and seeds. The transgenic plant or plant cell expressing a polypeptide of the present invention may be constructed in accordance with any method known in the art. See, for example, U.S. Pat. Nos. 6,309,872; 5,508,468, 7,151,204 and 7,157,623 (corn, or Zea mays); U.S. Pat. No. 7,141,723 (Cruciferae and Brassica plants); U.S. Pat. Nos. 6,576,820 and 6,365,807 (transgenic rice).

[0497] Nucleic acids and expression constructs of the invention can be introduced into a plant cell by any means. For example, nucleic acids or expression constructs can be introduced into the genome of a desired plant host, or, the nucleic acids or expression constructs can be episomes. Introduction into the genome of a desired plant can be such that the host's the lignocellulosic enzyme, e.g., glycosyl hydrolase, cellulase, endoglucanase, cellobiohydrolase, beta-glucosidase, xylanase, mannanse, β-xylosidase and/or arabinofuranosidase enzyme production is regulated by endogenous transcriptional or translational control elements. The invention also provides “knockout plants” where insertion of gene sequence by, e.g., homologous recombination, has disrupted the expression of the endogenous gene. Means to generate “knockout” plants are well-known in the art, see, e.g., Strepp (1998) Proc Natl. Acad. Sci. USA 95:4368-4373; Miao (1995) Plant J 7:359-365. See discussion on transgenic plants, below.

[0498] The nucleic acids of the invention can be used to confer desired traits on essentially any plant, e.g., on starch-producing plants, such as potato, tomato, soybean, beets, corn, wheat, rice, barley, and the like, either by transient or stable expression in the plant, e.g., as a stable transgenic plant. Nucleic acids of the invention can be used to manipulate metabolic pathways of a plant in order to optimize or alter host's expression of the lignocellulosic enzyme. The can change the lignocellulosic enzyme, e.g., glycosyl hydrolase, cellulase, endoglucanase, cellobiohydrolase, beta-glucosidase, xylanase, mannanse, β-xylosidase and/or arabinofuranosidase enzyme activity in a plant. Alternatively, a lignocellulosic enzyme of the invention can be used in production of a transgenic plant to produce a compound not naturally produced by that plant. This can lower production costs or create a novel product.

[0499] In one aspect, the first step in production of a transgenic plant involves making an expression construct for expression in a plant cell. These techniques are well known in the art. They can include selecting and cloning a promoter, a coding sequence for facilitating efficient binding of ribosomes to mRNA and selecting the appropriate gene terminator sequences. One exemplary constitutive promoter is CaMV35S, from the Is cauliflower mosaic virus, which generally results in a high degree of expression in plants. Other promoters are more specific and respond to cues in the plant's internal or external environment. An exemplary light-inducible promoter is the promoter from the cab gene, encoding the major chlorophyll a/b binding protein.

[0500] In one aspect, the nucleic acid is modified to achieve greater expression in a plant cell. For example, a sequence of the invention is likely to have a higher percentage of A-T nucleotide pairs compared to that seen in a plant, some of which prefer G-C nucleotide pairs. Therefore, A-T nucleotides in the coding sequence can be substituted with G-C nucleotides without significantly changing the amino acid sequence to enhance production of the gene product in plant cells.

[0501] Selectable marker gene can be added to the gene construct in order to identify plant cells or tissues that have successfully integrated the transgene. This may be necessary because achieving incorporation and expression of genes in plant cells is a rare event, occurring in just a few percent of the targeted tissues or cells. Selectable marker genes encode proteins that provide resistance to agents that are normally toxic to plants, such as antibiotics or herbicides. Only plant cells that have integrated the selectable marker gene will survive when grown on a medium containing the appropriate antibiotic or herbicide. As for other inserted genes, marker genes also require promoter and termination sequences for proper function.

[0502] In one aspect, making transgenic plants or seeds comprises incorporating sequences of the invention and, optionally, marker genes into a target expression construct (e.g., a plasmid), along with positioning of the promoter and the terminator sequences. This can involve transferring the modified gene into the plant through a suitable method. For example, a construct may be introduced directly into the genomic DNA of the plant cell using techniques such as electroporation and microinjection of plant cell protoplasts, or the constructs can be introduced directly to plant tissue using ballistic methods, such as DNA particle bombardment. For example, see, e.g., Christou (1997) Plant Mol. Biol. 35:197-203; Pawlowski (1996) Mol. Biotechnol. 6:17-30; Klein (1987) Nature 327:70-73; Takumi (1997) Genes Genet. Syst. 72:63-69, discussing use of particle bombardment to introduce transgenes into wheat; and Adam (1997) supra, for use of particle bombardment to introduce YACs into plant cells. For example, Rinehart (1997) supra, used particle bombardment to generate transgenic cotton plants. Apparatus for accelerating particles is described U.S. Pat. No. 5,015,580; and, the commercially available BioRad (Biolistics) PDS-2000 particle acceleration instrument; see also, John, U.S. Pat. No. 5,608,148; and Ellis, U.S. Pat. No. 5, 681,730, describing particle-mediated transformation of gymnosperms.

[0503] In one aspect, protoplasts can be immobilized and injected with a nucleic acids, e.g., an expression construct. Although plant regeneration from protoplasts is not easy with cereals, plant regeneration is possible in legumes using somatic embryogenesis from protoplast derived callus. Organized tissues can be transformed with naked DNA using gene gun technique, where DNA is coated on tungsten microprojectiles, shot 1/100th the size of cells, which carry the DNA deep into cells and organelles. Transformed tissue is then induced to regenerate, usually by somatic embryogenesis. This technique has been successful in several cereal species including maize and rice.

[0504] Nucleic acids, e.g., expression constructs, can also be introduced in to plant cells using recombinant viruses. Plant cells can be transformed using viral vectors, such as, e.g., tobacco mosaic virus derived vectors (Rouwendal (1997) Plant Mol. Biol. 33:989-999), see Porta (1996) “Use of viral replicons for the expression of genes in plants,” Mol. Biotechnol. 5:209-221.

[0505] Alternatively, nucleic acids, e.g., an expression construct, can be combined with suitable T-DNA flanking regions and introduced into a conventional Agrobacterium tumefaciens host vector. The virulence functions of the Agrobacterium tumefaciens host will direct the insertion of the construct and adjacent marker into the plant cell DNA when the cell is infected by the bacteria. Agrobacterium tumefaciens-mediated transformation techniques, including disarming and use of binary vectors, are well described in the scientific literature. See, e.g., Horsch (1984) Science 233:496-498; Fraley (1983) Proc. Natl. Acad. Sci. USA 80:4803 (1983); Gene Transfer to Plants, Potrykus, ed. (Springer-Verlag, Berlin 1995). The DNA in an A. tumefaciens cell is contained in the bacterial chromosome as well as in another structure known as a Ti (tumor-inducing) plasmid. The Ti plasmid contains a stretch of DNA termed T-DNA (approximately 20 kb long) that is transferred to the plant cell in the infection process and a series of vir (virulence) genes that direct the infection process. A. tumefaciens can only infect a plant through wounds: when a plant root or stem is wounded it gives off certain chemical signals, in response to which, the vir genes of A. tumefaciens become activated and direct a series of events necessary for the transfer of the T-DNA from the Ti plasmid to the plant's chromosome. The T-DNA then enters the plant cell through the wound. One speculation is that the T-DNA waits until the plant DNA is being replicated or transcribed, then inserts itself into the exposed plant DNA. In order to use A. tumefaciens as a transgene vector, the tumor-inducing section of T-DNA have to be removed, while retaining the T-DNA border regions and the vir genes. The transgene is then inserted between the T-DNA border regions, where it is transferred to the plant cell and becomes integrated into the plant's chromosomes.

[0506] The invention provides for the transformation of monocotyledonous plants using the nucleic acids of the invention, including important cereals, see Hiei (1997) Plant Mol. Biol. 35:205-218. See also, e.g., Horsch, Science (1984) 233:496; Fraley (1983) Proc. Natl. Acad. Sci USA 80:4803; Thykjaer (1997) supra; Park (1996) Plant Mol. Biol. 32:1135-1148, discussing T-DNA integration into genomic DNA. See also D'Halluin, U.S. Pat. No. 5,712,135, describing a process for the stable integration of a DNA comprising a gene that is functional in a cell of a cereal, or other monocotyledonous plant.

[0507] In one aspect, the third step involves selection and regeneration of whole plants capable of transmitting the incorporated target gene to the next generation. Such regeneration techniques may use manipulation of certain phytohormones in a tissue culture growth medium. In one aspect, the method uses a biocide and/or herbicide marker that has been introduced together with the desired nucleotide sequences. Plant regeneration from cultured protoplasts is described in Evans et al., Protoplasts Isolation and Culture, Handbook of Plant Cell Culture, pp. 124-176, MacMillilan Publishing Company, New York, 1983; and Binding, Regeneration of Plants, Plant Protoplasts, pp. 21-73, CRC Press, Boca Raton, 1985; see also U.S. Pat. No. 7,045,354. Regeneration can also be obtained from plant callus, explants, organs, or parts thereof. Such regeneration techniques are described generally in Klee (1987) Ann. Rev. of Plant Phys. 38:467-486. To obtain whole plants from transgenic tissues such as immature embryos, they can be grown under controlled environmental conditions in a series of media containing nutrients and hormones, a process known as tissue culture. Once whole plants are generated and produce seed, evaluation of the progeny begins.

[0508] In one aspect, after the expression cassette is stably incorporated in transgenic plants, it can be introduced into other plants by sexual crossing. Any of a number of standard breeding techniques can be used, depending upon the species to be crossed. Since transgenic expression of the nucleic acids of the invention leads to phenotypic changes, plants comprising the recombinant nucleic acids of the invention can be sexually crossed with a second plant to obtain a final product. Thus, the seed of the invention can be derived from a cross between two transgenic plants of the invention, or a cross between a plant of the invention and another plant. The desired effects (e.g., expression of the polypeptides of the invention to produce a plant in which flowering behavior is altered) can be enhanced when both parental plants express the polypeptides (e.g., a lignocellulosic enzyme, e.g., a glycosyl hydrolase, cellulase, endoglucanase, cellobiohydrolase, beta-glucosidase, xylanase, mannanse, β-xylosidase and/or arabinofuranosidase enzyme) of the invention. The desired effects can be passed to future plant generations by standard propagation means.

[0509] In one aspect, the nucleic acids and polypeptides of the invention are expressed in or inserted in any plant or seed. Transgenic plants of the invention can be dicotyledonous or monocotyledonous. Examples of monocot transgenic plants of the invention are grasses, such as meadow grass (blue grass, Poa), forage grass such as festuca, lolium, temperate grass, such as Agrostis, and cereals, e.g., wheat, oats, rye, barley, rice, sorghum, and maize (corn). In one aspect, transgenic monocot plants and seeds comprising monocot seed-specific promoters are used to produce enzymes of the invention; methods of producing transgenic monocot seeds from the transgenic plants are described, e.g., in U.S. Pat. No. 7,157,629; production of proteins in plant seeds and seed-preferred regulatory sequences (e.g., seed-specific promoters) are also described, e.g., in U.S. Pat. Nos. 7,081,566; 7,081,565; 7,078,588; 6,566,585; 6,642,437; 6,410,828; 6,066,781; 5,889,189; 5,850,016.

[0510] Examples of dicot transgenic plants of the invention are tobacco, legumes, such as lupins, potato, sugar beet, pea, bean and soybean, and cruciferous plants (family Brassicaceae), such as cauliflower, rape seed, and the closely related model organism Arabidopsis thaliana. Thus, the transgenic plants and seeds of the invention include a broad range of plants, including, but not limited to, species from the genera Anacardium, Arachis, Asparagus, Atropa, Avena, Brassica, Citrus, Citrullus, Capsicum, Carthamus, Cocos, Coffea, Cruciferae, Cucumis, Cucurbita, Daucus, Elaeis, Fragaria, Glycine, Gossypium, Helianthus, Heterocallis, Hordeum, Hyoscyamus, Lactuca, Linum, Lolium, Lupinus, Lycopersicon, Malus, Manihot, Majorana, Medicago, Nicotiana, Olea, Oryza, Panieum, Pannisetum, Persea, Phaseolus, Pistachia, Pisum, Pyrus, Prunus, Raphanus, Ricinus, Secale, Senecio, Sinapis, Solanum, Sorghum, Theobromus, Trigonella, Triticum, Vicia, Vitis, Vigna, and/or Zea; additionally, the invention provides transformed, infected or transduced cells and cell cultures (including protoplasts) derived from any of these genera, and these cells—which comprise a nucleic acid, expression cassette (e.g., vector) and/or polypeptide of the invention, can be stably or transiently transformed, infected or transduced.

[0511] In alternative embodiments, the nucleic acids of the invention are expressed in (e.g., as transgenic) plants which contain fiber cells, including, e.g., cotton, silk cotton tree (Kapok, Ceiba pentandra), desert willow, creosote bush, winterfat, balsa, ramie, kenaf, hemp, roselle, jute, sisal abaca and flax. In alternative embodiments, the transgenic plants of the invention can be members of the genus Gossypium, including members of any Gossypium species, such as G. arboreum;. G. herbaceum, G. barbadense, and G. hirsutum.

[0512] Transgenic plants (and cells and cell cultures derived therefrom) of the invention can include Cruciferae and Brassica plants, Compositae plants such as sunflower and leguminous plants such as pea. Transgenic plants of the invention also include transgenic trees and parts therefrom, e.g., including any wood, leaf, bark, root, pulp or paper product; see, e.g., U.S. Pat. No. 7,141,422, describing transgenic Populus species. The invention also provides for transgenic plants (and cells and cell cultures derived therefrom) to be used for producing large amounts of the polypeptides (e.g., a lignocellulosic enzyme, e.g., a glycosyl hydrolase, cellulase, endoglucanase, cellobiohydrolase, beta-glucosidase, xylanase, mannanse, β-xylosidase and/or arabinofuranosidase enzyme or antibody) of the invention. For example, see Palmgren (1997) Trends Genet. 13:348; Chong (1997) Transgenic Res. 6:289-296 (producing human milk protein beta-casein in transgenic potato plants using an auxin-inducible, bidirectional mannopine synthase (mas1′,2′) promoter with Agrobacterium tumefaciens-mediated leaf disc transformation methods).

[0513] Using known procedures, one of skill can screen for plants of the invention by detecting the increase or decrease of transgene mRNA or protein in transgenic plants. Means for detecting and quantitation of mRNAs or proteins are well known in the art.

### Polypeptides and Peptides

[0514] In one aspect, the invention provides isolated, synthetic or recombinant polypeptides having a sequence identity, or homology, e.g., at least about 50%, 51%, 52%, 53%, 54%, 55%, 56%, 57%, 58%, 59%, 60%, 61%, 62%, 63%, 64%, 65%, 66%, 67%, 68%, 69%, 70%, 71%, 72%, 73%, 74%, 75%, 76%, 77%, 78%, 79%, 80%, 81%, 82%, 83%, 84%, 85%, 86%, 87%, 88%, 89%, 90%, 91%, 92%, 93%, 94%, 95%, 96%, 97%, 98%, 99%, or more, or complete (100%) sequence identity, to an exemplary sequence of the invention (defined above), e.g., proteins having the sequence of SEQ ID NO:2, SEQ ID NO:4, etc. to SEQ ID NO:472, SEQ ID NO:473, SEQ ID NO:474, SEQ ID NO:475, SEQ ID NO:476, SEQ ID NO:477, SEQ ID NO:478, SEQ ID NO:479, all the even numbered SEQ ID NOs: between SEQ ID NO:490 and SEQ ID NO:700, SEQ ID NO:719 and/or SEQ ID NO:721, see also Table 1 to 3, and the Sequence Listing, and enzymatically active fragments (subsequences) thereof (having lignocellulosic enzyme activity) and/or immunologically active subsequences thereof (such as epitopes or immunogens, e.g., that can elicit—or generate—an antibody that can specifically bind to an exemplary polypeptide of this invention).

[0515] The percent sequence identity can be over the full length of the polypeptide, or, the identity can be over a region of at least about 15, 20, 25, 30, 35, 40, 45, 50, 60, 70, 80, 90, 100, 125, 150, 175, 200, 250, 300, 350, 400, 450, 500, 550, 600, 650, 700 or more residues. Polypeptides of the invention can also be shorter than the full length of exemplary polypeptides. In alternative aspects, the invention provides polypeptides (peptides, fragments) ranging in size between about 5 and the full length of a polypeptide, e.g., an enzyme, such as a polypeptide having a lignocellulolytic (lignocellulosic) activity, e.g., a ligninolytic and cellulolytic activity, including, e.g., a glycosyl hydrolase, cellulase, endoglucanase, cellobiohydrolase, beta-glucosidase, xylanase, mannanse, β-xylosidase and/or arabinofuranosidase enzyme; exemplary sizes being of about 5, 10, 15, 20, 25, 30, 35, 40, 45, 50, 55, 60, 65, 70, 75, 80, 85, 90, 100, 125, 150, 175, 200, 250, 300, 350, 400, 450, 500, 550, 600, 650, 700, or more residues, e.g., contiguous residues of an exemplary the lignocellulosic enzyme of the invention. Peptides of the invention (e.g., a subsequence of an exemplary polypeptide of the invention) can be useful as, e.g., labeling probes, antigens (immunogens), toleragens, motifs, the lignocellulosic enzyme active sites (e.g., “catalytic domains”), signal sequences and/or prepro domains.

[0516] In alternative aspects, the invention provides polypeptides having lignocellulolytic (lignocellulosic) activity, e.g., a ligninolytic and cellulolytic activity; and in one embodiment enzymes of the invention, including polypeptides with glycosyl hydrolase, endoglucanase, cellobiohydrolase, beta-glucosidase (β-glucosidase), xylanase, mannanse, β-xylosidase and/or arabinofuranosidase, are members of a genus of polypeptides sharing specific structural elements, e.g., amino acid residues, that correlate with lignocellulolytic (lignocellulosic) activity. These shared structural elements can be used for the routine generation of the lignocellulosic enzymes, e.g., for the routine generation of glycosyl hydrolase, cellulase, endoglucanase, cellobiohydrolase, beta-glucosidase, xylanase, mannanse, β-xylosidase and/or arabinofuranosidase variants. These shared structural elements of the lignocellulosic enzymes of the invention can be used as guidance for the routine generation of the lignocellulosic enzyme variants within the scope of the genus of polypeptides of the invention.

[0517] Lignocellulolytic or lignocellulosic enzymes of the invention, e.g., glycosyl hydrolase, cellulase, endoglucanase, cellobiohydrolase, beta-glucosidase, xylanase, mannanse, β-xylosidase and/or arabinofuranosidase enzymes of the invention, encompass, but are not limited to, any polypeptide or enzymes capable of catalyzing the complete or partial breakdown and/or hydrolysis of cellulose (e.g., exemplary polypeptides of the invention, see also Tables 2 and 3, and Examples, below), or any modification or hydrolysis of a cellulose, a hemicellulose or a lignocellulotic material, e.g., a biomass material comprising cellulose, hemicellulose and lignin.

[0518] Polypeptides having glucose oxidase activity are also used to practice this invention, e.g., in mixtures (“ensembles” or “cocktails”) of enzymes of this invention, e.g., in practicing methods of this invention, or compositions of the invention, e.g., in supplements, nutritional aids, pellets, feeds, foods of this invention; in one aspect, this glucose oxidase can have activity classified as EC 1.1.3.4, can bind to beta-D-glucose (an isomer of the six carbon sugar, glucose) and/or can aid in breaking the sugar down into its metabolites; and one embodiment can be in a multimeric form, e.g., as a dimeric protein, which can catalyze the oxidation of beta-D-glucose into D-glucono-1,5-lactone, which can then hydrolyze to gluconic acid. Alternative embodiments of all, and any, polypeptide of this invention includes multimeric forms, e.g., dimeric forms, as homodimers and/or heterodimers. Tables 2 and 3 summarize exemplary enzymatic activities of exemplary polypeptides of the invention, for example, as indicated by these charts, in alternative aspects these exemplary polypeptides have, but are not limited to, the listed various activities.

[0519] In alternative embodiments, polypeptides of the invention having glycoside hydrolase activity (can also be called glycosidase activity) catalyze the hydrolysis of the glycosidic linkage to generate two smaller sugars, and thus are useful for hydrolyzing—or degrading—a biomass, such as cellulose and hemicellulose. Polypeptides of the invention having glycoside hydrolase activity also can be useful in anti-bacterial defense strategies, including targeting lysozymes, in antimicrobial pathogenesis mechanisms, for example, to target or counteract a viral neuraminidase (which is a glycoside hydrolase). Polypeptides of the invention having glycoside hydrolase activity also can be useful in the equivalent of a normal cellular function, such as in the trimming of mannosidases involved in N-linked glycoprotein biosynthesis. A glycoside hydrolase of the invention can be classified into EC 3.2.1 as an enzyme catalyzing the hydrolysis of O- or S-glycosides. A glycoside hydrolase of the invention can also be classified as either a retaining or an inverting enzyme; or either as an exo or an endo acting enzyme; thus, in some embodiment a glycoside hydrolase of the invention can act at the a non-reducing end or in the middle of its substrate, e.g., an oligo/polysaccharide chain.

[0520] In alternative embodiments, polypeptides of the invention having cellulase activity can be classified as having endoglucanase, endo-1,4-beta-glucanase, carboxymethyl cellulase, endo-1,4-beta-D-glucanase, beta-1,4-glucanase, and/or beta-1,4-endoglucan hydrolase activity. In alternative embodiments, cellulase activity of polypeptides of the invention comprise an endo-cellulase activity that breaks internal bonds to disrupt the crystalline structure of cellulose and expose individual cellulose polysaccharide chains; or, exo-cellulase activity that cleaves 2 to 4 units from the ends of exposed chains produced by endocellulase, resulting in the tetrasaccharides or disaccharide, such as cellobiose. In alternative embodiments, cellulase activity of polypeptides of the invention comprise exo-cellulase or cellobiohydrolase activity, including activity comprising working processively from the reducing end, and/or working processively from the non-reducing end, of a cellulose. In alternative embodiments, cellulase activity of polypeptides of the invention comprise a cellobiase or beta-glucosidase activity that hydrolyses the endo-cellulase product into individual monosaccharides. In alternative embodiments, cellulase activity of polypeptides of the invention comprise an oxidative cellulase activity that depolymerizes cellulose by radical reactions, e.g., as a cellobiose dehydrogenase. In alternative embodiments, cellulase activity of polypeptides of the invention comprise a cellulose phosphorylase activity that depolymerizes cellulose using phosphates instead of water. In one aspect, an enzyme of the invention can hydrolyze cellulose to beta-glucose. to In alternative embodiments, polypeptides of the invention can have a xylanase activity, including activity comprising hydrolyzing (degrading) a linear polysaccharide beta-1,4-xylan into a xylose; and in one aspect, thus breaking down a hemicellulose, which is a major component of the cell wall of plants.

[0521] Assays for Determining or Characterizing the Activity of an Enzyme

[0522] Assays for determining or characterizing the activity of an enzyme, such as determining cellulase, xylanase, cellobiohydrolase, β-glucosidase, β-xylosidase and/or arabinofuranosidase or related activity, e.g., to determine if a polypeptide is within the scope of the invention, are well known in the art, for example, see Thomas M. Wood, K. Mahalingeshwara Bhat, “Methods for Measuring Cellulase Activities”, Methods in Enzymology, 160, 87-111 (1988); U.S. Pat. Nos: 5,747,320; 5,795,766; 5,973,228; 6,022,725; 6,087,131; 6,127,160; 6,184,018; 6,423,524; 6,566,113; 6,921,655.

[0523] In some aspects, a polypeptide of the invention can have an alternative enzymatic activity. For example, the polypeptide can have endoglucanase/cellulase activity; xylanase activity; protease activity; etc.; in other words, enzymes of the invention can be multi-functional in that they have relaxed substrate specificities. In fact, studies shown herein demonstrate that two exemplary glucose oxidases of this invention enzymes are multi-functional in that they have relaxed substrate specificities, see discussion above.

[0524] “Amino acid” or “amino acid sequence” as used herein refer to an oligopeptide, peptide, polypeptide, or protein sequence, or to a fragment, portion, or subunit of any of these and to naturally occurring or synthetic molecules. “Amino acid” or “amino acid sequence” include an oligopeptide, peptide, polypeptide, or protein sequence, or to a fragment, portion, or subunit of any of these, and to naturally occurring or synthetic molecules. The term “polypeptide” as used herein, refers to amino acids joined to each other by peptide bonds or modified peptide bonds, i.e., peptide isosteres and may contain modified amino acids other than the 20 gene-encoded amino acids. The polypeptides may be modified by either natural processes, such as post-translational processing, or by chemical modification techniques which are well known in the art. Modifications can occur anywhere in the polypeptide, including the peptide backbone, the amino acid side-chains and the amino or carboxyl termini. It will be appreciated that the same type of modification may be present in the same or varying degrees at several sites in a given polypeptide. Also a given polypeptide may have many types of modifications. Modifications include acetylation, acylation, ADP-ribosylation, amidation, covalent attachment of flavin, covalent attachment of a heme moiety, covalent attachment of a nucleotide or nucleotide derivative, covalent attachment of a lipid or lipid derivative, covalent attachment of a phosphatidylinositol, cross-linking cyclization, disulfide bond formation, demethylation, formation of covalent cross-links, formation of cysteine, formation of pyroglutamate, formylation, gamma-carboxylation, glycosylation, GPI anchor formation, hydroxylation, iodination, methylation, myristolyation, oxidation, pegylation, glucan hydrolase processing, phosphorylation, prenylation, racemization, selenoylation, sulfation and transfer-RNA mediated addition of amino acids to protein such as arginylation. (See Creighton, T. E., Proteins—Structure and Molecular Properties 2nd Ed., W.H. Freeman and Company, New York (1993); Posttranslational Covalent Modification of Proteins, B. C. Johnson, Ed., Academic Press, New York, pp. 1-12 (1983)). The peptides and polypeptides of the invention also include all “mimetic” and “peptidomimetic” forms, as described in further detail, below.

[0525] As used herein, the term “isolated” means that the material (e.g., a protein or nucleic acid of the invention) is removed from its original environment (e.g., the natural environment if it is naturally occurring). For example, a naturally-occurring polynucleotide or polypeptide present in a living animal is not isolated, but the same polynucleotide or polypeptide, separated from some or all of the coexisting materials in the natural system, is isolated. Such polynucleotides could be part of a vector and/or such polynucleotides or polypeptides could be part of a composition and still be isolated in that such vector or composition is not part of its natural environment. As used herein, the term “purified” does not require absolute purity; rather, it is intended as a relative definition. Individual nucleic acids obtained from a library have been conventionally purified to electrophoretic homogeneity. The sequences obtained from these clones could not be obtained directly either from the library or from total human DNA. The purified nucleic acids of the invention have been purified from the remainder of the genomic DNA in the organism by at least 10⁴-10⁶ fold. In one aspect, the term “purified” includes nucleic acids which have been purified from the remainder of the genomic DNA or from other sequences in a library or other environment by at least one order of magnitude, e.g., in one aspect, two or three orders, or, four or five orders of magnitude.

[0526] “Recombinant” polypeptides or proteins refer to polypeptides or proteins produced by recombinant DNA techniques; i.e., produced from cells transformed by an exogenous DNA construct encoding the desired polypeptide or protein. “Synthetic” polypeptides or protein are those prepared by chemical synthesis. Solid-phase chemical peptide synthesis methods can also be used to synthesize the polypeptide or fragments of the invention. Such method have been known in the art since the early 1960's (Merrifield, R. B., J. Am. Chem. Soc., 85:2149-2154, 1963) (See also Stewart, J. M. and Young, J. D., Solid Phase Peptide Synthesis, 2nd Ed., Pierce Chemical Co., Rockford, Ill., pp. 11-12)) and have recently been employed in commercially available laboratory peptide design and synthesis kits (Cambridge Research Biochemicals). Such commercially available laboratory kits have generally utilized the teachings of H. M. Geysen et al, Proc. Natl. Acad. Sci., USA, 81:3998 (1984) and provide for synthesizing peptides upon the tips of a multitude of “rods” or “pins” all of which are connected to a single plate.

[0527] The phrase “substantially identical” in the context of two nucleic acids or polypeptides, refers to two or more sequences that have, e.g., at least about 50%, 51%, 52%, 53%, 54%, 55%, 56%, 57%, 58%, 59%, 60%, 61%, 62%, 63%, 64%, 65%, 66%, 67%, 68%, 69%, 70%, 71%, 72%, 73%, 74%, 75%, 76%, 77%, 78%, 79%, 80%, 81%, 82%, 83%, 84%, 85%, 86%, 87%, 88%, 89%, 90%, 91%, 92%, 93%, 94%, 95%, 96%, 97%, 98%, 99%, or more nucleotide or amino acid residue (sequence) identity, when compared and aligned for maximum correspondence, as measured using one of the known sequence comparison algorithms or by visual inspection. In alternative aspects, the substantial identity exists over a region of at least about 100 or more residues and most commonly the sequences are substantially identical over at least about 150 to 200 or more residues. In some aspects, the sequences are substantially identical over the entire length of the coding regions.

[0528] Additionally a “substantially identical” amino acid sequence is a sequence that differs from a reference sequence by one or more conservative or non-conservative amino acid substitutions, deletions, or insertions. In one aspect, the substitution occurs at a site that is not the active site of the molecule, or, alternatively the substitution occurs at a site that is the active site of the molecule, provided that the polypeptide essentially retains its functional (enzymatic) properties. A conservative amino acid substitution, for example, substitutes one amino acid for another of the same class (e.g., substitution of one hydrophobic amino acid, such as isoleucine, valine, leucine, or methionine, for another, or substitution of one polar amino acid for another, such as substitution of arginine for lysine, glutamic acid for aspartic acid or glutamine for asparagine). One or more amino acids can be deleted, for example, from a lignocellulosic enzyme, e.g., a glycosyl hydrolase, cellulase, endoglucanase, cellobiohydrolase, beta-glucosidase, xylanase, mannanse, β-xylosidase and/or arabinofuranosidase polypeptide, resulting in modification of the structure of the polypeptide, without significantly altering its biological activity. For example, amino- or carboxyl-terminal amino acids that are not required for the lignocellulosic enzyme, e.g., glycosyl hydrolase, cellulase, endoglucanase, cellobiohydrolase, beta-glucosidase, xylanase, mannanse, β-xylosidase and/or arabinofuranosidase enzyme biological activity can be removed. Modified polypeptide sequences of the invention can be assayed for the lignocellulosic enzyme biological activity by any number of methods, including contacting the modified polypeptide sequence with a substrate and determining whether the modified polypeptide decreases the amount of specific substrate in the assay or increases the bioproducts of the enzymatic reaction of a functional the lignocellulosic enzyme polypeptide with the substrate.

[0529] “Fragments” as used herein are a portion of a naturally occurring protein which can exist in at least two different conformations. Fragments can have the same or substantially the same amino acid sequence as the naturally occurring protein. Fragments which have different three dimensional structures as the naturally occurring protein are also included. An example of this, is a “pro-form” molecule, such as a low activity proprotein that can be modified by cleavage to produce a mature enzyme with significantly higher activity.

[0530] In one aspect, the invention provides crystal (three-dimensional) structures of proteins and peptides, e.g., cellulases, of the invention; which can be made and analyzed using the routine protocols well known in the art, e.g., as described in MacKenzie (1998) Crystal structure of the family 7 endoglucanase I (Cel7B) from Humicola insolens at 2.2 A resolution and identification of the catalytic nucleophile by trapping of the covalent glycosyl-enzyme intermediate, Biochem. J. 335:409-416; Sakon (1997) Structure and mechanism of endo/exocellulase E4 from Thermomonospora fusca, Nat. Struct. Biol 4:810-818; Varrot (1999) Crystal structure of the catalytic core domain of the family 6 cellobiohydrolase H, Cel6A, from Humicola insolens, at 1.92 A resolution, Biochem. J. 337:297-304; illustrating and identifying specific structural elements as guidance for the routine generation of cellulase variants of the invention, and as guidance for identifying enzyme species within the scope of the invention.

[0531] Polypeptides and peptides of the invention can be isolated from natural sources, be synthetic, or be recombinantly generated polypeptides. Peptides and proteins can be recombinantly expressed in vitro or in vivo. The peptides and polypeptides of the invention can be made and isolated using any method known in the art. Polypeptide and peptides of the invention can also be synthesized, whole or in part, using chemical methods well known in the art. See e.g., Caruthers (1980) Nucleic Acids Res. Symp. Ser. 215-223; Horn (1980) Nucleic Acids Res. Symp. Ser. 225-232; Banga, A. K., Therapeutic Peptides and Proteins, Formulation, Processing and Delivery Systems (1995) Technomic Publishing Co., Lancaster, Pa. For example, peptide synthesis can be performed using various solid-phase techniques (see e.g., Roberge (1995) Science 269:202; Merrifield (1997) Methods Enzymol. 289:3-13) and automated synthesis may be achieved, e.g., using the ABI 431A Peptide Synthesizer (Perkin Elmer) in accordance with the instructions provided by the manufacturer.

[0532] The peptides and polypeptides of the invention can also be glycosylated. The glycosylation can be added post-translationally either chemically or by cellular biosynthetic mechanisms, wherein the later incorporates the use of known glycosylation motifs, which can be native to the sequence or can be added as a peptide or added in the nucleic acid coding sequence. The glycosylation can be O-linked or N-linked.

[0533] The peptides and polypeptides of the invention, as defined above, include all “mimetic” and “peptidomimetic” forms. The terms “mimetic” and “peptidomimetic” refer to a synthetic chemical compound which has substantially the same structural and/or functional characteristics of the polypeptides of the invention. The mimetic can be either entirely composed of synthetic, non-natural analogues of amino acids, or, is a chimeric molecule of partly natural peptide amino acids and partly non-natural analogs of amino acids. The mimetic can also incorporate any amount of natural amino acid conservative substitutions as long as such substitutions also do not substantially alter the mimetic's structure and/or activity. As with polypeptides of the invention which are conservative variants or members of a genus of polypeptides of the invention (e.g., having about 50% or more sequence identity to an exemplary sequence of the invention), routine experimentation will determine whether a mimetic is within the scope of the invention, i.e., that its structure and/or function is not substantially altered. Thus, in one aspect, a mimetic composition is within the scope of the invention if it has a lignocellulosic enzyme, e.g., a glycosyl hydrolase, cellulase, endoglucanase, cellobiohydrolase, beta-glucosidase, xylanase, mannanse, β-xylosidase and/or arabinofuranosidase enzymes activity.

[0534] Polypeptide mimetic compositions of the invention can contain any combination of non-natural structural components. In alternative aspect, mimetic compositions of the invention include one or all of the following three structural groups: a) residue linkage groups other than the natural amide bond (“peptide bond”) linkages; b) non-natural residues in place of naturally occurring amino acid residues; or c) residues which induce secondary structural mimicry, i.e., to induce or stabilize a secondary structure, e.g., a beta turn, gamma turn, beta sheet, alpha helix conformation, and the like. For example, a polypeptide of the invention can be characterized as a mimetic when all or some of its residues are joined by chemical means other than natural peptide bonds. Individual peptidomimetic residues can be joined by peptide bonds, other chemical bonds or coupling means, such as, e.g., glutaraldehyde, N-hydroxysuccinimide esters, bifunctional maleimides, N,N′-dicyclohexylcarbodiimide (DCC) or N,N′-diisopropylcarbodiimide (DIC). Linking groups that can be an alternative to the traditional amide bond (“peptide bond”) linkages include, e.g., ketomethylene (e.g., —C(═O)—CH₂— for —C(═O)—NH—), aminomethylene (CH₂—NH), ethylene, olefin (CH═CH), ether (CH₂—O), thioether (CH₂—S), tetrazole (CN₄—), thiazole, retroamide, thioamide, or ester (see, e.g., Spatola (1983) in Chemistry and Biochemistry of Amino Acids, Peptides and Proteins, Vol. 7, pp 267-357, “Peptide Backbone Modifications,” Marcell Dekker, NY).

[0535] A polypeptide of the invention can also be characterized as a mimetic by containing all or some non-natural residues in place of naturally occurring amino acid residues. Non-natural residues are well described in the scientific and patent literature; a few exemplary non-natural compositions useful as mimetics of natural amino acid residues and guidelines are described below. Mimetics of aromatic amino acids can be generated by replacing by, e.g., D- or L- naphylalanine; D- or L-phenylglycine; D- or L-2 thieneylalanine; D- or L-1, -2, 3-, or 4-pyreneylalanine; D- or L-3 thieneylalanine; D- or L-(2-pyridinyl)-alanine; D- or L-(3-pyridinyl)-alanine; D- or L-(2-pyrazinyl)-alanine; D- or L-(4-isopropyl)-phenylglycine; D-(trifluoromethyl)-phenylglycine; D-(trifluoromethyl)-phenylalanine; D-p-fluoro-phenylalanine; D- or L-p-biphenylphenylalanine; D- or L-p-methoxy-biphenylphenylalanine; D- or L-2-indole(alkyl)alanines; and, D- or L-alkylainines, where alkyl can be substituted or unsubstituted methyl, ethyl, propyl, hexyl, butyl, pentyl, isopropyl, iso-butyl, sec-isotyl, iso-pentyl, or a non-acidic amino acids. Aromatic rings of a non-natural amino acid include, e.g., thiazolyl, thiophenyl, pyrazolyl, benzimidazolyl, naphthyl, furanyl, pyrrolyl, and pyridyl aromatic rings.

[0536] Mimetics of acidic amino acids can be generated by substitution by, e.g., non-carboxylate amino acids while maintaining a negative charge; (phosphono)alanine; sulfated threonine. Carboxyl side groups (e.g., aspartyl or glutamyl) can also be selectively modified by reaction with carbodiimides (R′—N—C—N—R′) such as, e.g., 1-cyclohexyl-3(2-morpholinyl-(4-ethyl)carbodiimide or 1-ethyl-3(4-azonia-4,4-dimetholpentyl)carbodiimide. Aspartyl or glutamyl can also be converted to asparaginyl and glutaminyl residues by reaction with ammonium ions. Mimetics of basic amino acids can be generated by substitution with, e.g., (in addition to lysine and arginine) the amino acids ornithine, citrulline, or (guanidino)-acetic acid, or (guanidino)alkyl-acetic acid, where alkyl is defined above. Nitrile derivative (e.g., containing the CN-moiety in place of COOH) can be substituted for asparagine or glutamine. Asparaginyl and glutaminyl residues can be deaminated to the corresponding aspartyl or glutamyl residues. Arginine residue mimetics can be generated by reacting arginyl with, e.g., one or more conventional reagents, including, e.g., phenylglyoxal, 2,3-butanedione, 1,2-cyclo-hexanedione, or ninhydrin, in one aspect under alkaline conditions. Tyrosine residue mimetics can be generated by reacting tyrosyl with, e.g., aromatic diazonium compounds or tetranitromethane. N-acetylimidizol and tetranitromethane can be used to form O-acetyl tyrosyl species and 3-nitro derivatives, respectively. Cysteine residue mimetics can be generated by reacting cysteinyl residues with, e.g., alpha-haloacetates such as 2-chloroacetic acid or chloroacetamide and corresponding amines; to give carboxymethyl or carboxyamidomethyl derivatives. Cysteine residue mimetics can also be generated by reacting cysteinyl residues with, e.g., bromo-trifluoroacetone, alpha-bromo-beta-(5-imidozoyl)propionic acid; chloroacetyl phosphate, N-alkylmaleimides, 3-nitro-2-pyridyl disulfide; methyl 2-pyridyl disulfide; p-chloromercuribenzoate; 2-chloromercuri-4 nitrophenol; or, chloro-7-nitrobenzo-oxa-1,3-diazole. Lysine mimetics can be generated (and amino terminal residues can be altered) by reacting lysinyl with, e.g., succinic or other carboxylic acid anhydrides. Lysine and other alpha-amino-containing residue mimetics can also be generated by reaction with imidoesters, such as methyl picolinimidate, pyridoxal phosphate, pyridoxal, chloroborohydride, trinitro-benzenesulfonic acid, O-methylisourea, 2,4, pentanedione, and transamidase-catalyzed reactions with glyoxylate. Mimetics of methionine can be generated by reaction with, e.g., methionine sulfoxide. Mimetics of proline include, e.g., pipecolic acid, thiazolidine carboxylic acid, 3- or 4-hydroxy proline, dehydroproline, 3- or 4-methylproline, or 3,3,-dimethylproline. Histidine residue mimetics can be generated by reacting histidyl with, e.g., diethylprocarbonate or para-bromophenacyl bromide. Other mimetics include, e.g., those generated by hydroxylation of proline and lysine; phosphorylation of the hydroxyl groups of seryl or threonyl residues; methylation of the alpha-amino groups of lysine, arginine and histidine; acetylation of the N-terminal amine; methylation of main chain amide residues or substitution with N-methyl amino acids; or amidation of C-terminal carboxyl groups.

[0537] In one aspect, a residue, e.g., an amino acid, of a polypeptide of the invention can also be replaced by an amino acid (or peptidomimetic residue) of the opposite chirality. In one aspect, any amino acid naturally occurring in the L-configuration (which can also be referred to as the R or S, depending upon the structure of the chemical entity) can be replaced with the amino acid of the same chemical structural type or a peptidomimetic, but of the opposite chirality, referred to as the D-amino acid, but also can be referred to as the R- or S-form.

[0538] The invention also provides methods for modifying the polypeptides of the invention by either natural processes, such as post-translational processing (e.g., phosphorylation, acylation, etc), or by chemical modification techniques, and the resulting modified polypeptides. Modifications can occur anywhere in the polypeptide, including the peptide backbone, the amino acid side-chains and the amino or carboxyl termini. It will be appreciated that the same type of modification may be present in the same or varying degrees at several sites in a given polypeptide. Also a given polypeptide may have many types of modifications. In one aspect, modifications include acetylation, acylation, ADP-ribosylation, amidation, covalent attachment of flavin, covalent attachment of a heme moiety, covalent attachment of a nucleotide or nucleotide derivative, covalent attachment of a lipid or lipid derivative, covalent attachment of a phosphatidylinositol, cross-linking cyclization, disulfide bond formation, demethylation, formation of covalent cross-links, formation of cysteine, formation of pyroglutamate, formylation, gamma-carboxylation, glycosylation, GPI anchor formation, hydroxylation, iodination, methylation, myristolyation, oxidation, pegylation, proteolytic processing, phosphorylation, prenylation, racemization, selenoylation, sulfation, and transfer-RNA mediated addition of amino acids to protein such as arginylation. See, e.g., Creighton, T. E., Proteins—Structure and Molecular Properties 2nd Ed., W.H. Freeman and Company, New York (1993); Posttranslational Covalent Modification of Proteins, B. C. Johnson, Ed., Academic Press, New York, pp. 1-12 (1983).

[0539] Solid-phase chemical peptide synthesis methods can also be used to synthesize the polypeptide or fragments of the invention. Such method have been known in the art since the early 1960's (Merrifield, R. B., J. Am. Chem. Soc., 85:2149-2154, 1963) (See also Stewart, J. M. and Young, J. D., Solid Phase Peptide Synthesis, 2nd Ed., Pierce Chemical Co., Rockford, Ill., pp. 11-12)) and have recently been employed in is commercially available laboratory peptide design and synthesis kits (Cambridge Research Biochemicals). Such commercially available laboratory kits have generally utilized the teachings of H. M. Geysen et al, Proc. Natl. Acad. Sci., USA, 81:3998 (1984) and provide for synthesizing peptides upon the tips of a multitude of “rods” or “pins” all of which are connected to a single plate. When such a system is utilized, a plate of rods or pins is inverted and inserted into a second plate of corresponding wells or reservoirs, which contain solutions for attaching or anchoring an appropriate amino acid to the pin's or rod's tips. By repeating such a process step, i.e., inverting and inserting the rod's and pin's tips into appropriate solutions, amino acids are built into desired peptides. In addition, a number of available FMOC peptide synthesis systems are available. For example, assembly of a polypeptide or fragment can be carried out on a solid support using an Applied Biosystems, Inc. Model 431A™ automated peptide synthesizer. Such equipment provides ready access to the peptides of the invention, either by direct synthesis or by synthesis of a series of fragments that can be coupled using other known techniques.

[0540] The polypeptides of the invention include the lignocellulosic enzyme, e.g., glycosyl hydrolase, cellulase, endoglucanase, cellobiohydrolase, beta-glucosidase, xylanase, mannanse, β-xylosidase and/or arabinofuranosidase enzymes in an active or inactive form. For example, the polypeptides of the invention include proproteins before “maturation” or processing of prepro sequences, e.g., by a proprotein-processing enzyme, such as a proprotein convertase to generate an “active” mature protein. The polypeptides of the invention include the lignocellulosic enzyme, e.g., glycosyl hydrolase, cellulase, endoglucanase, cellobiohydrolase, beta-glucosidase, xylanase, mannanse, β-xylosidase and/or arabinofuranosidase enzymes inactive for other reasons, e.g., before “activation” by a post-translational processing event, e.g., an endo- or exo-peptidase or proteinase action, a phosphorylation event, an amidation, a glycosylation or a sulfation, a dimerization event, and the like. The polypeptides of the invention include all active forms, including active subsequences, e.g., catalytic domains or active sites, of the enzyme.

[0541] The invention includes immobilized the lignocellulosic enzyme, e.g., glycosyl hydrolase, cellulase, endoglucanase, cellobiohydrolase, beta-glucosidase, xylanase, mannanse, β-xylosidase and/or arabinofuranosidase enzymes, anti-cellulase, e.g., anti-endoglucanase, anti-cellobiohydrolase and/or anti-beta-glucosidase antibodies and fragments thereof. The invention provides methods for inhibiting the lignocellulosic enzyme, e.g., glycosyl hydrolase, cellulase, endoglucanase, cellobiohydrolase, beta-glucosidase, xylanase, mannanse, β-xylosidase and/or arabinofuranosidase enzyme activity, e.g., using dominant negative mutants or anti-cellulase, e.g., anti-endoglucanase, anti-cellobiohydrolase and/or anti-beta-glucosidase antibodies of the invention. The invention includes heterocomplexes, e.g., fusion proteins, heterodimers, etc., comprising the lignocellulosic enzyme, e.g., glycosyl hydrolase, cellulase, endoglucanase, cellobiohydrolase, beta-glucosidase, xylanase, mannanse, β-xylosidase and/or arabinofuranosidase enzymes of the invention.

[0542] Polypeptides of the invention can have a lignocellulosic enzyme, e.g., a glycosyl hydrolase, cellulase, endoglucanase, cellobiohydrolase, beta-glucosidase, xylanase, mannanse, β-xylosidase and/or arabinofuranosidase enzyme activity under various conditions, e.g., extremes in pH and/or temperature, oxidizing agents, and the like. The invention provides methods leading to alternative the lignocellulosic enzyme, e.g., glycosyl hydrolase, cellulase, endoglucanase, cellobiohydrolase, beta-glucosidase, xylanase, mannanse, β-xylosidase and/or arabinofuranosidase enzyme preparations with different catalytic efficiencies and stabilities, e.g., towards temperature, oxidizing agents and changing wash conditions. In one aspect, the lignocellulosic enzyme variants can be produced using techniques of site-directed mutagenesis and/or random mutagenesis. In one aspect, directed evolution can be used to produce a great variety of the lignocellulosic enzyme variants with alternative specificities and stability.

[0543] The proteins of the invention are also useful as research reagents to identify the lignocellulosic enzyme, e.g., glycosyl hydrolase, cellulase, endoglucanase, cellobiohydrolase, beta-glucosidase, xylanase, mannanse, β-xylosidase and/or arabinofuranosidase enzyme modulators, e.g., activators or inhibitors of the lignocellulosic enzyme activity. Briefly, test samples (compounds, broths, extracts, and the like) are added to the lignocellulosic enzyme assays to determine their ability to inhibit substrate cleavage. Inhibitors identified in this way can be used in industry and research to reduce or prevent undesired proteolysis. As with the lignocellulosic enzyme inhibitors can be combined to increase the spectrum of activity.

[0544] The enzymes of the invention are also useful as research reagents to digest proteins or in protein sequencing. For example, the lignocellulosic enzyme, e.g., glycosyl hydrolase, cellulase, endoglucanase, cellobiohydrolase, beta-glucosidase, xylanase, mannanse, β-xylosidase and/or arabinofuranosidase enzymes may be used to break polypeptides into smaller fragments for sequencing using, e.g. an automated sequencer.

[0545] The invention also provides methods of discovering new the lignocellulosic enzyme, e.g., glycosyl hydrolase, cellulase, endoglucanase, cellobiohydrolase, beta-glucosidase, xylanase, mannanse, β-xylosidase and/or arabinofuranosidase enzymes using the nucleic acids, polypeptides and antibodies of the invention. In one aspect, phagemid libraries are screened for expression-based discovery of the lignocellulosic enzyme. In another aspect, lambda phage libraries are screened for expression-based discovery of the lignocellulosic enzymes. Screening of the phage or phagemid libraries can allow the detection of toxic clones; improved access to substrate; reduced need for engineering a host, by-passing the potential for any bias resulting from mass excision of the library; and, faster growth at low clone densities. Screening of phage or phagemid libraries can be in liquid phase or in solid phase. In one aspect, the invention provides screening in liquid phase. This gives a greater flexibility in assay conditions; additional substrate flexibility; higher sensitivity for weak clones; and ease of automation over solid phase screening.

[0546] The invention provides screening methods using the proteins and nucleic acids of the invention and robotic automation to enable the execution of many thousands of biocatalytic reactions and screening assays in a short period of time, e.g., per day, as well as ensuring a high level of accuracy and reproducibility (see discussion of arrays, below). As a result, a library of derivative compounds can be produced in a matter of weeks. For further teachings on modification of molecules, including small molecules, see PCT/US94/09174; U.S. Pat. No. 6,245,547.

[0547] In one aspect, polypeptides or fragments of the invention are obtained through biochemical enrichment or purification procedures. The sequence of potentially homologous polypeptides or fragments may be determined by the lignocellulosic enzyme, e.g., glycosyl hydrolase, cellulase, endoglucanase, cellobiohydrolase, beta-glucosidase, xylanase, mannanse, β-xylosidase and/or arabinofuranosidase enzyme assays (see, e.g., Examples 1, 2 and 3, below), gel electrophoresis and/or microsequencing. The sequence of the prospective polypeptide or fragment of the invention can be compared to an exemplary polypeptide of the invention, or a fragment, e.g., comprising at least about 5, 10, 15, 20, 25, 30, 35, 40, 50, 75, 100, or 150 or more consecutive amino acids thereof using any of the programs described above.

[0548] Another aspect of the invention is an assay for identifying fragments or variants of the invention, which retain the enzymatic function of the polypeptides of the invention. For example the fragments or variants of said polypeptides, may be used to catalyze biochemical reactions, which indicate that the fragment or variant retains the enzymatic activity of a polypeptide of the invention. An exemplary assay for determining if fragments of variants retain the enzymatic activity of the polypeptides of the invention includes the steps of: contacting the polypeptide fragment or variant with a substrate molecule under conditions which allow the polypeptide fragment or variant to function and detecting either a decrease in the level of substrate or an increase in the level of the specific reaction product of the reaction between the polypeptide and substrate.

[0549] The present invention exploits the unique catalytic properties of enzymes. Whereas the use of biocatalysts (i.e., purified or crude enzymes, non-living or living cells) in chemical transformations normally requires the identification of a particular biocatalyst that reacts with a specific starting compound, the present invention uses selected biocatalysts and reaction conditions that are specific for functional groups that are present in many starting compounds, such as small molecules. Each biocatalyst is specific for one functional group, or several related functional groups and can react with many starting compounds containing this functional group.

[0550] In one aspect, the biocatalytic reactions produce a population of derivatives from a single starting compound. These derivatives can be subjected to another round of biocatalytic reactions to produce a second population of derivative compounds. Thousands of variations of the original small molecule or compound can be produced with each iteration of biocatalytic derivatization.

[0551] Enzymes react at specific sites of a starting compound without affecting the rest of the molecule, a process which is very difficult to achieve using traditional chemical methods. This high degree of biocatalytic specificity provides the means to identify a single active compound within the library. The library is characterized by the series of biocatalytic reactions used to produce it, a so-called “biosynthetic history”. Screening the library for biological activities and tracing the biosynthetic history identifies the specific reaction sequence producing the active compound. The reaction sequence is repeated and the structure of the synthesized compound determined. This mode of identification, unlike other synthesis and screening approaches, does not require immobilization technologies and compounds can be synthesized and tested free in solution using virtually any type of screening assay. It is important to note, that the high degree of specificity of enzyme reactions on functional groups allows for the “tracking” of specific enzymatic reactions that make up the biocatalytically produced library.

[0552] In one aspect, procedural steps are performed using robotic automation enabling the execution of many thousands of biocatalytic reactions and/or screening assays per day as well as ensuring a high level of accuracy and reproducibility. Robotic automation can also be used to screen for cellulase activity to determine if a polypeptide is within the scope of the invention. As a result, in one aspect, a library of derivative compounds can be produced in a matter of weeks which would take years to produce using “traditional” chemical or enzymatic screening methods.

[0553] In a particular aspect, the invention provides a method for modifying small molecules, comprising contacting a polypeptide encoded by a polynucleotide described herein, and/or enzymatically active subsequences (fragments) thereof, with a small molecule to produce a modified small molecule. A library of modified small molecules is tested to determine if a modified small molecule is present within the library, which exhibits a desired activity. A specific biocatalytic reaction which produces the modified small molecule of desired activity is identified by systematically eliminating each of the biocatalytic reactions used to produce a portion of the library and then testing the small molecules produced in the portion of the library for the presence or absence of the modified small molecule with the desired activity. The specific biocatalytic reactions which produce the modified small molecule of desired activity is optionally repeated. The biocatalytic reactions are conducted with a group of biocatalysts that react with distinct structural moieties found within the structure of a small molecule, each biocatalyst is specific for one structural moiety or a group of related structural moieties; and each biocatalyst reacts with many different small molecules which contain the distinct structural moiety.

[0554] Lignocellulosic Enzyme Signal Sequences Carbohydrate Binding Domains, and Prepro and Catalytic Domains

[0555] The invention provides lignocellulosic enzymes, e.g., glycosyl hydrolase, cellulase, endoglucanase, cellobiohydrolase, beta-glucosidase, xylanase, mannanse, β-xylosidase and/or arabinofuranosidase enzymes with or without homologous or heterologous signal sequence(s) (e.g., signal peptides (SPs)), prepro domains, carbohydrate binding domains and/or catalytic domains (CDs). The SPs, prepro domains and/or CDs of the invention can be isolated, synthetic or recombinant peptides or can be part of a fusion protein, e.g., as heterologous domain(s) in a chimeric protein. These enzymes can be multidomain constructions, for example, an enzyme of the invention can have one or more or multiple domains (e.g., SP, prepro domain, carbohydrate binding domains and/or catalytic domains) added to its sequence or spliced into its sequence (e.g., as a fusion (chimeric) protein) to replace its endogenous equivalent domain (e.g., endogenous SP, prepro domain, carbohydrate binding domains and/or catalytic domains). The invention provides isolated, synthetic or recombinant nucleic acids encoding these multidomain, or substituted domain enzymes, and the individual catalytic domains (CDs), carbohydrate binding domains, prepro domains and signal sequences (SPs, e.g., a peptide having a sequence comprising/consisting of amino terminal residues of a polypeptide of the invention) derived from a polypeptide of the invention.

[0556] The invention provides isolated, synthetic or recombinant signal sequences (e.g., signal peptides) consisting of or comprising the sequence of (a sequence as set forth in) residues 1 to 14, 1 to 15, 1 to 16, 1 to 17, 1 to 18, 1 to 19, 1 to 20, 1 to 21, 1 to 22, 1 to 23, 1 to 24, 1 to 25, 1 to 26, 1 to 27, 1 to 28, 1 to 28, 1 to 30, 1 to 31, 1 to 32, 1 to 33, 1 to 34, 1 to 35, 1 to 36, 1 to 37, 1 to 38, 1 to 40, 1 to 41, 1 to 42, 1 to 43, 1 to 44, 1 to 45, 1 to 46, or 1 to 47, or more, of a polypeptide of the invention, e.g., exemplary polypeptides of the invention, see also Tables 3 and 4, and the Sequence Listing.

[0557] In one aspect, the invention provides signal sequences comprising the first 14, 15, 16, 17, 18, 19, 20, 21, 22, 23, 24, 25, 26, 27, 28, 29, 30, 31, 32, 33, 34, 35, 36, 37, 38, 39, 40, 41, 42, 43, 44, 45, 46, 47, 48, 49, 50, 51, 52, 53, 54, 55, 56, 57, 58, 59, 60, 61, 62, 63, 64, 65, 66, 67, 68, 69, 70 or more amino terminal residues of a polypeptide of the invention.

[0558] For example, Tables 3 and 4, above, set forth exemplary signal (leader) sequences of the invention, e.g., as in the polypeptide having the sequence of SEQ ID NO:2, encoded, e.g., by SEQ ID NO:1, which has a signal sequence comprising (or consisting of) the amino terminal 33 residues of SEQ ID NO:2, or

MSRNIRKSSFIFSLLTIIVLIASMFLQTQTAQA

[0559] Additional exemplary signal sequences are similarly set forth in Tables 3 and 4, above; these are exemplary signal sequences, and the invention is not limited to these exemplary sequences, for example, another signal sequence for SEQ ID NO:2 may be

MSRNIRKSSFIFSLLTIIVLIASMFLQTQTAQ,
or
MSRNIRKSSFIFSLLTIIVLIASMFLQTQTA, etc.

[0560] Tables 1 to 4, and the sequence listing, also set forth other information regarding the exemplary sequences of the invention, as discussed in detail, above.

[0561] The invention includes polypeptides, including polypeptides of the invention, with or without a signal sequence (i.e., signal peptides (SPs), e.g., as described above and/or set forth in Tables 1 to 4), prepro domains, carbohydrate binding domains and/or catalytic domains (CDs). The invention includes polypeptides with heterologous signal sequences, prepro domains, carbohydrate binding domains and/or catalytic domains. For example, polypeptides of the invention include enzymes where their endogenous signal (leader) sequence, prepro domains, carbohydrate binding domains and/or catalytic domain is replaced with a heterologous functionally equivalent domain sequence for another similar enzyme or from a completely different enzyme source. The SP domain, prepro domain, carbohydrate binding domain and/or catalytic domain sequence (e.g., including a sequence of the invention used as a heterologous domain) can be located internally, or on the amino terminal or the carboxy terminal end of the protein.

[0562] In one aspect, a heterologous signal sequence used to practice this invention targets an encoded protein (e.g., an enzyme of the invention) to a vacuole, the endoplasmic reticulum, a chloroplast or a starch granule. In one aspect, a signal sequence of this invention targets an encoded protein (e.g., an enzyme of the invention) to a vacuole, the endoplasmic reticulum, a chloroplast or a starch granule.

[0563] The invention also includes isolated, synthetic or recombinant signal sequences, carbohydrate binding domains, prepro sequences and/or catalytic domains (e.g., “active sites”) comprising subsequences of enzymes of invention. The polypeptide comprising a signal sequence of the invention can be a lignocellulosic enzyme, e.g., a glycosyl hydrolase, cellulase, endoglucanase, cellobiohydrolase, beta-glucosidase, xylanase, mannanse, β-xylosidase and/or arabinofuranosidase enzyme of the invention or another lignocellulosic enzyme (not of this invention) or another enzyme or other polypeptide.

[0564] In one aspect, the invention provides a nucleic acid sequence(s) encoding a signal sequence, carbohydrate binding domain, prepro sequence and/or catalytic domain from a lignocellulosic enzyme of the invention operably linked to a nucleic acid sequence of a different the lignocellulosic enzyme, or, optionally, another enzyme; also, a signal sequence (SPs) carbohydrate binding domain, prepro sequence and/or catalytic domain from a non-lignocellulosic enzyme can be used.

[0565] The invention also provides isolated, synthetic or recombinant polypeptides comprising a signal sequence, carbohydrate binding domain (or module, “CBM”), prepro sequence and/or catalytic domain (active site) of the invention and one or more heterologous sequences. In one aspect, the heterologous sequences are sequences not naturally associated with an enzyme, or with the domains to which they are joined (e.g., as a multidomain fusion protein), or are endogenous domains but sequence modified and/or intramolecularly rearranged (re-positioned). The sequence to which a signal sequence, carbohydrate binding domain (CBM), prepro sequence and/or catalytic domain are not naturally associated can be internal to a heterologous sequence (e.g., enzyme), or on an amino terminal end, carboxy terminal end, and/or on both ends of the heterologous sequence (e.g., enzyme). For example, in one aspect, a heterologous or modified or re-positioned CBM, signal sequence and/or active site (e.g., an “at least one CBM”) is positioned approximate to a chimeric polypeptide of the invention's catalytic domain, CBM and/or signal sequence, e.g., wherein the at least one catalytic domain, CBM and/or signal sequence is positioned: e.g., approximate to the C-terminus of the polypeptide's catalytic domain, or, approximate to the N-terminus of the polypeptide's catalytic domain; in alternative embodiments, the term “approximate” means positioned one, 2, 3, 4, 5, 6, 7, 8, 9, 10, 11, 12, 13, 14, 15, 16, 17, 18, 19 or 20 or more residues from the catalytic domain, CBM, active site or C-terminus or N-terminus.

[0566] In one aspect, the invention provides an isolated, synthetic or recombinant polypeptide comprising (or consisting of) a polypeptide comprising a signal sequence (SP), CBM, prepro domain and/or catalytic domain (CD) of the invention with the proviso that it is not associated with any sequence to which it is naturally associated (e.g., a lignocellulosic enzyme, e.g., a glycosyl hydrolase, cellulase, endoglucanase, cellobiohydrolase, beta-glucosidase, xylanase, mannanse, β-xylosidase and/or arabinofuranosidase enzyme sequence).

[0567] Plant Signal Sequences

[0568] Endogenous or heterologous signal sequence(s) used to practice this invention can include any plant signal sequence (signal peptide, SP) (note: any SP can be used to practice this invention, and the term SP includes an moiety that can direct or target a polypeptide, and includes SNs of viral, bacterial, mammalian or synthetic origin). Coding sequence for any signal sequence, including plant signal sequences, may be operably linked to a polynucleotide encoding the chimeric polypeptide, e.g., enzyme. For example, a polypeptide of the invention can comprise the maize γ-zein N-terminal signal sequence for targeting to the endoplasmic reticulum and secretion into the apoplast (the free diffusional space outside the plasma membrane); see, e.g., Torrent (1997) Plant Mol Biol. 34(1):139-149. As with all polypeptides of the invention, including these chimeric proteins, the invention provides nucleic acids encoding them.

[0569] Another exemplary signal sequence that can be used to practice this invention is the amino acid sequence motif SEKDEL for retaining polypeptides in the endoplasmic reticulum; see, e.g., Munro (1987) Cell 48(5):899-907. For example, in one aspect, the invention provides an enzyme of the invention comprising the N-terminal sequence from maize γ-zein operably linked to the motif SEKDEL, and nucleic acids encoding this chimeric sequence.

[0570] The invention also provides polypeptides of the invention operably linked to a waxy amyloplast targeting peptide; thus, the polypeptide will be targeted to an amyloplast or to a starch granule because of this fusion to the waxy amyloplast targeting peptide; see, e.g., Klosgen (1986), Klosgen (2001) Biochim Biophys Acta. 1541(1-2):22-33; Qbadou (2003) J. Cell Sci. 116 (Pt 5):837-846.

[0571] In another aspect, a polynucleotide encoding a hyperthermophilic processing enzyme is operably linked to a chloroplast (amyloplast) transit peptide (CTP) and a CBH in the form of a starch binding domain, e.g., from the waxy gene; see, e.g., Klosgen (1991) Mol. Gen. Genet. 225(2):297-304; Gutensohn (2006) Plant Biol. (Stuttg). 8(1):18-30; Ji (2004) Plant Biotechnol. J. 2(3):251-260. Starch binding domains are well known in the art, and any starch binding domain can be used to practice this invention, e.g., as a heterologous domain linked to or as part of (e.g., as a chimeric recombinant protein) an enzyme of this invention; see e.g., Firouzabadi Planta (2006) October 13^{th} Epub; Ji (2004) Plant Biotechnol. J. 2(3):251-260. In another aspect, an enzyme of the invention is designed to target starch granules by operably linking it to a starch binding domain, e.g., the waxy starch binding domain; this linking—as with other heterologous domains joined to an enzyme of the invention—can be as a chimeric recombinant protein or chemically joined, e.g., with a linker, or electrostatically. In one aspect, the invention provides a fusion polypeptide (a chimeric recombinant protein) comprising an N-terminal amyloplast targeting sequence, e.g., from waxy, operably linked to an α-amylase fusion polypeptide comprising a starch binding domain, e.g., the waxy starch binding domain.

[0572] Carbohydrate Binding Module(s) (CBMs)

[0573] As discussed above, in one aspect, a lignocellulosic enzyme, e.g., a glycosyl hydrolase, cellulase, endoglucanase, cellobiohydrolase, beta-glucosidase, xylanase, mannanse, β-xylosidase and/or arabinofuranosidase enzyme of the invention is a recombinant or a chimeric, e.g., multidomain, enzyme that comprises at least one (e.g., can include multiple) carbohydrate binding module(s) (CBMs), which can be a heterologous or endogenous carbohydrate binding modules (including modified or rearranged CBMs), wherein the carbohydrate binding module(s) (CBM) can be any known module (or “domain”), e.g., including a glycosyl hydrolase binding domain, and/or, a cellulose binding module, a lignin binding module, a xylose binding module, a mannanse binding module, a xyloglucan-specific module (see, e.g., Gunnarsson (2006) Glycobiology 16:1171-1180), a arabinofuranosidase binding module, etc.; which in alternative embodiments can be from another lignocellulosic enzyme of the invention, or not of the invention; e.g., the domain is “heterologous” to the enzyme; including modules described in, e.g., U.S. Pat. App. Pub. No. 20060257984; 20060147581; U.S. Pat. No. 7,129,069. Thus, the chimeric, e.g., multidomain, enzyme of the invention can have an endogenous carbohydrate binding module rearranged or multiplied within its own sequence, or can have “switched” or replacement carbohydrate binding modules for its own endogenous modules, or can have one or more additional carbohydrate binding modules spliced into its sequences (internal or carboxy- and/or amino-terminal).

[0574] Thus, the polypeptides of the invention can comprise any of the carbohydrate binding modules that have been assigned into three major types: A, B and C; or, the chimeric polypeptide of the invention can comprise a heterologous or modified or internally rearranged CBM comprising a CBM_{—}1, CBM_{—}2, CBM_{—}2a, CBM_{—}2b, CBM_{—}3, CBM_{—}3a, CBM_{—}3b, CBM_{—}3c, CBM_{—}4, CBM_{—}5, CBM_{—}5_{—}12, CBM_{—}6, CBM_{—}7, CBM_{—}8, CBM_{—}9, CBM_{—}10, CBM_{—}11, CBM_{—}12, CBM_{—}13, CBM_{—}14, CBM_{—}15, CBM_{—}16 or any of the CBMs from a CMB family of CBM_{—}1 to CBM_{—}48, or any combination thereof.

[0575] The chimeric, or hybrid (e.g., recombinant) enzymes of the invention can comprise one or several of any other these types as heterologous or rearranged endogenous modules: including one or any module member of the CBM_{—}1 to CBM_{—}48 families, and/or Type A modules, with a flat binding surface, bind to insoluble crystalline glucans; Type B modules, displaying a binding cleft, have affinity for free single carbohydrate chains; Type C modules, which possess a solvent-exposed binding slot, have the ability to bind mono- and disaccharides (see, e.g., Protein Engineering Design and Selection (2004) 17(3):213-221; Coutinho (1999) Carbohydrate-active enzymes: an integrated database approach. In “Recent Advances in Carbohydrate Bioengineering”, H. J. Gilbert, G. Davies, B. Henrissat and B. Svensson eds., The Royal Society of Chemistry, Cambridge, pp. 3-12; Tomme (1989) FEBS Lett. 243, 239-243; Gilkes (1988) J. Biol. Chem. 263, 10401-10407; Tomme (1995) in Enzymatic Degradation of Insoluble Polysaccharides (Saddler, J. N. & Penner, M., eds.), Cellulose-binding domains: classification and properties. pp. 142-163, American Chemical Society, Washington; Henrissat (1997) Structural and sequence-based classification of glycoside hydrolases. Curr. Op. Struct. Biol. 7:637-644; Coutinho (2003) An evolving hierarchical family classification for glycosyltransferases. J. Mol. Biol. 328:307-317; Boraston (2004) Carbohydrate-binding modules: fine-tuning polysaccharide recognition. Biochem. J. 382:769-781; thus, CBMs are well characterized in the art.

[0576] In one aspect, SPs, carbohydrate binding domains, catalytic domains and/or prepro sequences of the invention are identified using routine screening protocols, or sequence homology analysis, of lignocellulosic enzymes of the invention, or other polypeptide. For example, the effect of adding or deleting or modifying a subsequence of a polypeptide of the invention on its behavior in a protein targeting pathway, the ability to bind substrates, such as carbohydrates, e.g., cellulases or lignins, to hydrolyze, etc. will identify a novel domain of the invention (pathways by which proteins are sorted and transported to their proper cellular location are often referred to as protein targeting pathways). The signal sequences of the invention can vary in length from about 10 to 65, or more, amino acid residues. Various methods of recognition of signal sequences (SPs), carbohydrate binding domains, catalytic domains and/or prepro are known to those of skill in the art. For example, in one aspect, novel lignocellulosic enzyme signal peptides are identified by a method referred to as SignalP. SignalP uses a combined neural network which recognizes both signal peptides and their cleavage sites; e.g., as described in Nielsen (1997) “Identification of prokaryotic and eukaryotic signal peptides and prediction of their cleavage sites.” Protein Engineering 10:1-6. Methods for identifying “prepro” domain sequences and signal sequences are well known in the art, see, e.g., Van de Ven (1993) Crit. Rev. Oncog. 4(2):115-136. For example, to identify a prepro sequence, the protein is purified from the extracellular space and the N-terminal protein sequence is determined and compared to the unprocessed form. In another embodiment, the heterologous SPs comprise a yeast signal sequence. A lignocellulosic enzyme of the invention can comprise a heterologous SP and/or prepro in a vector, e.g., a pPIC series vector (Invitrogen, Carlsbad, Calif.). Example 7, below, describes exemplary routine protocols for identifying carbohydrate binding module sequences.

[0577] Hybrid (Chimeric) the Lignocellulosic Enzymes and Peptide Libraries

[0578] In one aspect, the invention provides hybrid lignocellulosic enzymes, e.g., glycosyl hydrolase, cellulase, endoglucanase, cellobiohydrolase, beta-glucosidase, xylanase, mannanse, β-xylosidase and/or arabinofuranosidase enzymes as fusion proteins, which in one aspect also comprise peptide libraries, and in one embodiment these peptide libraries comprise or consist of sequences of the invention (subsequences of enzyme of the invention). The peptide libraries of the invention can be used to isolate peptide modulators (e.g., activators or inhibitors) of targets, such as the lignocellulosic enzyme, e.g., glycosyl hydrolase, cellulase, endoglucanase, cellobiohydrolase, beta-glucosidase, xylanase, mannanse, β-xylosidase and/or arabinofuranosidase enzyme substrates, receptors, co-factors, modulators and the like. The peptide libraries of the invention can be used to identify formal binding partners of targets, such as ligands, e.g., cytokines, hormones, co-factors, modulators and the like. In one aspect, the invention provides chimeric proteins comprising a signal sequence (SP), prepro domain and/or catalytic domain (CD) of the invention or a combination thereof and a heterologous sequence (see above).

[0579] In one aspect, the fusion proteins of the invention (e.g., the peptide moieties) are conformationally stabilized (relative to linear peptides) to allow a higher binding affinity for targets. The invention provides fusions of lignocellulosic enzymes of the invention and other peptides, including known and random peptides. They can be fused in such a manner that the structure of the lignocellulosic enzyme is not significantly perturbed and the peptide is metabolically or structurally conformationally stabilized. This allows the creation of a peptide library that is easily monitored both for its presence within cells and its quantity.

[0580] Amino acid sequence variants of the invention can be characterized by a predetermined nature of a desired variation, e.g., a feature that sets them apart from a naturally occurring form, e.g., an allelic or interspecies variation of a lignocellulosic enzyme sequence of the invention. In one aspect, the variants of the invention exhibit the same qualitative biological activity as the naturally occurring analogue. Alternatively, the variants can be selected for having modified characteristics. In one aspect, while the site or region for introducing an amino acid sequence variation is predetermined, the mutation per se need not be predetermined. For example, in order to optimize the performance of a mutation at a given site, random mutagenesis may be conducted at the target codon or region and the expressed the lignocellulosic enzyme, e.g., glycosyl hydrolase, cellulase, endoglucanase, cellobiohydrolase, beta-glucosidase, xylanase, mannanse, β-xylosidase and/or arabinofuranosidase enzyme variants screened for the optimal combination of desired activity. Techniques for making substitution mutations at predetermined sites in DNA having a known sequence are well known, as discussed herein for example, M13 primer mutagenesis and PCR mutagenesis. Screening of the mutants can be done using, e.g., assays of glucan hydrolysis. In alternative aspects, amino acid substitutions can be single residues; insertions can be on the order of from about 1 to 20 amino acids, although considerably larger insertions can be done. Deletions can range from about 1 to about 20, 30, 40, 50, 60, 70 residues or more. To obtain a final derivative with the optimal properties, substitutions, deletions, insertions or any combination thereof may be used. Generally, these changes are done on a few amino acids to minimize the alteration of the molecule. However, larger changes may be tolerated in certain circumstances.

[0581] The invention provides the lignocellulosic enzyme, e.g., glycosyl hydrolase, cellulase, endoglucanase, cellobiohydrolase, beta-glucosidase, xylanase, mannanse, β-xylosidase and/or arabinofuranosidase enzymes where the structure of the polypeptide backbone, the secondary or the tertiary structure, e.g., an alpha-helical or beta-sheet structure, has been modified. In one aspect, the charge or hydrophobicity has been modified. In one aspect, the bulk of a side chain has been modified. Substantial changes in function or immunological identity are made by selecting substitutions that are less conservative. For example, substitutions can be made which more significantly affect: the structure of the polypeptide backbone in the area of the alteration, for example a alpha-helical or a beta-sheet structure; a charge or a hydrophobic site of the molecule, which can be at an active site; or a side chain. The invention provides substitutions in polypeptide of the invention where (a) a hydrophilic residues, e.g. seryl or threonyl, is substituted for (or by) a hydrophobic residue, e.g. leucyl, isoleucyl, phenylalanyl, valyl or alanyl; (b) a cysteine or proline is substituted for (or by) any other residue; (c) a residue having an electropositive side chain, e.g. lysyl, arginyl, or histidyl, is substituted for (or by) an electronegative residue, e.g. glutamyl or aspartyl; or (d) a residue having a bulky side chain, e.g. phenylalanine, is substituted for (or by) one not having a side chain, e.g. glycine. The variants can exhibit the same qualitative biological activity (i.e., a lignocellulosic enzyme, e.g., a glycosyl hydrolase, cellulase, endoglucanase, cellobiohydrolase, beta-glucosidase, xylanase, mannanse, β-xylosidase and/or arabinofuranosidase enzyme activity) although variants can be selected to modify the characteristics of the lignocellulosic enzyme, e.g., glycosyl hydrolase, cellulase, endoglucanase, cellobiohydrolase, beta-glucosidase, xylanase, mannanse, β-xylosidase and/or arabinofuranosidase enzymes as needed.

[0582] In one aspect, the lignocellulosic enzymes of the invention comprise epitopes or purification tags, signal sequences (SPs) or other fusion sequences, etc. In one aspect, the lignocellulosic enzyme of the invention can be fused to a random peptide to form a fusion polypeptide. By “fused” or “operably linked” herein is meant that the random peptide and the lignocellulosic enzyme are linked together, in such a manner as to minimize the disruption to the stability of the lignocellulosic enzyme structure, e.g., it retains the lignocellulosic enzyme activity. The fusion polypeptide (or fusion polynucleotide encoding the fusion polypeptide) can comprise further components as well, including multiple peptides at multiple loops.

[0583] In one aspect, the peptides and nucleic acids encoding them are randomized, either fully randomized or they are biased in their randomization, e.g. in nucleotide/residue frequency generally or per position. “Randomized” means that each nucleic acid and peptide consists of essentially random nucleotides and amino acids, respectively. In one aspect, the nucleic acids which give rise to the peptides can be chemically synthesized, and thus may incorporate any nucleotide at any position. Thus, when the nucleic acids are expressed to form peptides, any amino acid residue may be incorporated at any position. The synthetic process can be designed to generate randomized nucleic acids, to allow the formation of all or most of the possible combinations over the length of the nucleic acid, thus forming a library of randomized nucleic acids. The library can provide a sufficiently structurally diverse population of randomized expression products to affect a probabilistically sufficient range of cellular responses to provide one or more cells exhibiting a desired response. Thus, the invention provides an interaction library large enough so that at least one of its members will have a structure that gives it affinity for some molecule, protein, or other factor.

[0584] The invention provides a methods and sequences for generating chimeric polypeptides which may encode biologically active hybrid polypeptides (e.g., hybrid the lignocellulosic enzyme, e.g., glycosyl hydrolase, cellulase, endoglucanase, cellobiohydrolase, beta-glucosidase, xylanase, mannanse, β-xylosidase and/or arabinofuranosidase enzymes). In one aspect, the original polynucleotides (e.g., an exemplary nucleic acid of the invention) encode biologically active polypeptides. In one aspect, a method of the invention produces new hybrid polypeptides by utilizing cellular processes which integrate the sequence of the original polynucleotides such that the resulting hybrid polynucleotide encodes a polypeptide demonstrating activities derived, but different, from the original biologically active polypeptides (e.g., enzyme or antibody of the invention). For example, the original polynucleotides may encode a particular enzyme (e.g., a lignocellulosic enzyme) from or found in different microorganisms. An enzyme encoded by a first polynucleotide from one organism or variant may, for example, function effectively under a particular environmental condition, e.g. high salinity. An enzyme encoded by a second polynucleotide from a different organism or variant may function effectively under a different environmental condition, such as extremely high temperatures. A hybrid polynucleotide containing sequences from the first and second original polynucleotides may encode an enzyme which exhibits characteristics of both enzymes encoded by the original polynucleotides. Thus, the enzyme encoded by the hybrid polynucleotide of the invention may function effectively under environmental conditions shared by each of the enzymes encoded by the first and second polynucleotides, e.g., high salinity and extreme temperatures.

[0585] In one aspect, a hybrid polypeptide generated by a method of the invention may exhibit specialized enzyme activity not displayed in the original enzymes. For example, following recombination and/or reductive reassortment of polynucleotides encoding the lignocellulosic enzyme, e.g., glycosyl hydrolase, cellulase, endoglucanase, cellobiohydrolase, beta-glucosidase, xylanase, mannanse, β-xylosidase and/or arabinofuranosidase enzymes, the resulting hybrid polypeptide encoded by a hybrid polynucleotide can be screened for specialized non-lignocellulosic enzyme activity, e.g., screened for peptidase, phosphorylase, amidase, phosphorylase, etc., activities, obtained from each of the original enzymes. In one aspect, the hybrid polypeptide is screened to ascertain those chemical functionalities which distinguish the hybrid polypeptide from the original parent polypeptides, such as the temperature, pH or salt concentration at which the hybrid polypeptide functions.

[0586] In one aspect, the invention relates to a method for producing a biologically active hybrid polypeptide and screening such a polypeptide for enhanced activity by:
[0587] 1) introducing at least a first polynucleotide in operable linkage and a second polynucleotide in operable linkage, the at least first polynucleotide and second polynucleotide sharing at least one region of partial sequence homology, into a suitable host cell;
[0588] 2) growing the host cell under conditions which promote sequence reorganization resulting in a hybrid polynucleotide in operable linkage;
[0589] 3) expressing a hybrid polypeptide encoded by the hybrid polynucleotide;
[0590] 4) screening the hybrid polypeptide under conditions which promote identification of enhanced biological activity; and
[0591] 5) isolating the a polynucleotide encoding the hybrid polypeptide.

### Isolating and Discovering Lignocellulosic Enzymes

[0592] The invention provides methods for isolating and discovering lignocellulosic enzymes and the nucleic acids that encode them. Polynucleotides or enzymes may be isolated from individual organisms (“isolates”), collections of organisms that have been grown in defined media (“enrichment cultures”), or, uncultivated organisms (“environmental samples”). The organisms can be isolated by, e.g., in vivo biopanning (see discussion, below). The use of a culture-independent approach to derive polynucleotides encoding novel bioactivities from environmental samples is most preferable since it allows one to access untapped resources of biodiversity. Polynucleotides or enzymes also can be isolated from any one of numerous organisms, e.g. bacteria. In addition to whole cells, polynucleotides or enzymes also can be isolated from crude enzyme preparations derived from cultures of these organisms, e.g., bacteria.

[0593] In one aspect, “environmental libraries” are generated from environmental samples and represent the collective genomes of naturally occurring organisms archived in cloning vectors that can be propagated in suitable prokaryotic hosts. In this aspect, because the cloned DNA is initially extracted directly from environmental samples, the libraries are not limited to the small fraction of prokaryotes that can be grown in pure culture. In one aspect, a normalization of the environmental DNA present in these samples allows more equal representation of the DNA from all of the species present in the original sample; this can dramatically increase the efficiency of finding interesting genes from minor constituents of the sample which may be under-represented by several orders of magnitude compared to the dominant species.

[0594] In one aspect, gene libraries generated from one or more uncultivated microorganisms are screened for an activity of interest. Potential pathways encoding bioactive molecules of interest are first captured in prokaryotic cells in the form of gene expression libraries. In one aspect, polynucleotides encoding activities of interest are to isolated from such libraries and introduced into a host cell. The host cell is grown under conditions which promote recombination and/or reductive reassortment creating potentially active biomolecules with novel or enhanced activities.

[0595] In vivo biopanning may be performed utilizing a FACS-based and non-optical (e.g., magnetic) based machines. In one aspect, complex gene libraries are constructed with vectors which contain elements which stabilize transcribed RNA. For example, the inclusion of sequences which result in secondary structures such as hairpins which are designed to flank the transcribed regions of the RNA would serve to enhance their stability, thus increasing their half life within the cell. The probe molecules used in the biopanning process consist of oligonucleotides labeled with reporter molecules that only fluoresce upon binding of the probe to a target molecule. These probes are introduced into the recombinant cells from the library using one of several transformation methods. The probe molecules bind to the transcribed target mRNA resulting in DNA/RNA heteroduplex molecules. Binding of the probe to a target will yield a fluorescent signal which is detected and sorted by the FACS machine during the screening process.

[0596] In one aspect, subcloning is performed to further isolate sequences of interest. In subcloning, a portion of DNA is amplified, digested, generally by restriction enzymes, to cut out the desired sequence, the desired sequence is ligated into a recipient vector and is amplified. At each step in subcloning, the portion is examined for the activity of interest, in order to ensure that DNA that encodes the structural protein has not been excluded. The insert may be purified at any step of the subcloning, for example, by gel electrophoresis prior to ligation into a vector or where cells containing the recipient vector and cells not containing the recipient vector are placed on selective media containing, for example, an antibiotic, which will kill the cells not containing the recipient vector. Specific methods of subcloning cDNA inserts into vectors are well-known in the art (Sambrook et al., Molecular Cloning: A Laboratory Manual, 2nd Ed., Cold Spring Harbor Laboratory Press (1989)). In another aspect, the enzymes of the invention are subclones. Such subclones may differ from the parent clone by, for example, length, a mutation, a tag or a label.

[0597] The microorganisms from which the polynucleotide may be discovered, isolated or prepared include prokaryotic microorganisms, such as Eubacteria and Archaebacteria and lower eukaryotic microorganisms such as fungi, some algae and protozoa. Polynucleotides may be discovered, isolated or prepared from samples, e.g. environmental samples, in which case the nucleic acid may be recovered without culturing of an organism or recovered from one or more cultured organisms. In one aspect, such microorganisms may be extremophiles, such as hyperthermophiles, psychrophiles, psychrotrophs, halophiles, barophiles and acidophiles. Polynucleotides encoding enzymes isolated from extremophilic microorganisms can be used. Enzymes of this invention can function at temperatures above 100° C., e.g., as those found in is terrestrial hot springs and deep sea thermal vents, or at temperatures below 0° C., e.g., as those found in arctic waters, in a saturated salt environment, e.g., as those found in the Dead Sea, at pH values around 0, e.g., as those found in coal deposits and geothermal sulfur-rich springs, or at pH values greater than 11, e.g., as those found in sewage sludge. In one aspect, enzymes of the invention have high activity throughout a wide range of temperatures and pHs.

[0598] Polynucleotides selected and isolated as hereinabove described are introduced into a suitable host cell. A suitable host cell is any cell which is capable of promoting recombination and/or reductive reassortment. The selected polynucleotides are in one aspect already in a vector which includes appropriate control sequences. The host cell can be a higher eukaryotic cell, such as a mammalian cell, or a lower eukaryotic cell, such as a yeast cell, or in one aspect, the host cell can be a prokaryotic cell, such as a bacterial cell. Introduction of the construct into the host cell can be effected by calcium phosphate transfection, DEAE-Dextran mediated transfection, or electroporation.

[0599] Exemplary hosts include bacterial cells, such as E. coli, Streptomyces, Salmonella typhimurium; fungal cells, such as yeast; insect cells such as Drosophila S2 and Spodoptera Sf9; animal cells such as CHO, COS or Bowes melanoma; adenoviruses; and plant cells; see discussion, above. The selection of an appropriate host is deemed to be within the scope of those skilled in the art from the teachings herein.

[0600] Various mammalian cell culture systems can be employed to express recombinant protein; examples of mammalian expression systems include the COS-7 lines of monkey kidney fibroblasts, described in “SV40-transformed simian cells support the replication of early SV40 mutants” (Gluzman, 1981) and other cell lines capable of expressing a compatible vector, for example, the C127, 3T3, CHO, HeLa and BHK cell lines. Mammalian expression vectors can comprise an origin of replication, a suitable promoter and enhancer and also any necessary ribosome binding sites, polyadenylation site, splice donor and acceptor sites, transcriptional termination sequences and 5′ flanking nontranscribed sequences. DNA sequences derived from the SV40 splice and polyadenylation sites may be used to provide the required nontranscribed genetic elements.

[0601] In another aspect, nucleic acids, polypeptides and methods of the invention are used in biochemical pathways, or to generate novel polynucleotides encoding biochemical pathways from one or more operons or gene clusters or portions thereof. For example, bacteria and many eukaryotes have a coordinated mechanism for regulating genes whose products are involved in related processes. The genes are clustered, in structures referred to as “gene clusters,” on a single chromosome and are transcribed together under the control of a single regulatory sequence, including a single promoter which initiates transcription of the entire cluster. Thus, a gene cluster is a group of adjacent genes that are either identical or related, usually as to their function (an example of a biochemical pathway encoded by gene clusters are polyketides).

[0602] In one aspect, gene cluster DNA is isolated from different organisms and ligated into vectors, e.g., vectors containing expression regulatory sequences which can control and regulate the production of a detectable protein or protein-related array activity from the ligated gene clusters. Use of vectors which have an exceptionally large capacity for exogenous DNA introduction can be appropriate for use with such gene clusters and are described by way of example herein to include the f-factor (or fertility factor) of E. coli. This f-factor of E. coli is a plasmid which affects high-frequency transfer of itself during conjugation and is ideal to achieve and stably propagate large DNA fragments, such as gene clusters from mixed microbial samples. One aspect is to use cloning vectors, referred to as “fosmids” or bacterial artificial chromosome (BAC) vectors. These are derived from E. coli f-factor which is able to stably integrate large segments of genomic DNA. When integrated with DNA from a mixed uncultured environmental sample, this makes it possible to achieve large genomic fragments in the form of a stable “environmental DNA library.” Another type of vector for use in the present invention is a cosmid vector. Cosmid vectors were originally designed to clone and propagate large segments of genomic DNA. Cloning into cosmid vectors is described in detail in Sambrook et al., Molecular Cloning: A Laboratory Manual, 2nd Ed., Cold Spring Harbor Laboratory Press (1989). Once ligated into an appropriate vector, two or more vectors containing different polyketide synthase gene clusters can be introduced into a suitable host cell. Regions of partial sequence homology shared by the gene clusters will promote processes which result in sequence reorganization resulting in a hybrid gene cluster. The novel hybrid gene cluster can then be screened for enhanced activities not found in the original gene clusters.

[0603] Methods for screening for various enzyme activities are known to those of skill in the art and are discussed throughout the present specification, see, e.g., Examples 1, 2 and 3, below. Such methods may be employed when isolating the polypeptides and polynucleotides of the invention.

[0604] In one aspect, the invention provides methods for discovering and isolating cellulases, e.g., endoglucanase, cellobiohydrolase, beta-glucosidase, xylanase, mannanse, β-xylosidase and/or arabinofuranosidase, or compounds to modify the activity of these enzymes, using a whole cell approach (see discussion, below). clones encoding the lignocellulosic enzyme, e.g., glycosyl hydrolase, cellulase, endoglucanase, cellobiohydrolase, beta-glucosidase, xylanase, mannanse, β-xylosidase and/or arabinofuranosidase from genomic DNA library can be screened.

### Screening Methodologies and “On-line” Monitoring Devices

[0605] In practicing the methods of the invention, a variety of apparatus and methodologies can be used to in conjunction with the polypeptides and nucleic acids of the invention, e.g., to screen polypeptides for the lignocellulosic enzyme, e.g., glycosyl hydrolase, cellulase, endoglucanase, cellobiohydrolase, beta-glucosidase, xylanase, mannanse, β-xylosidase and/or arabinofuranosidase enzyme activity, to screen compounds as potential modulators, e.g., activators or inhibitors, of a lignocellulosic enzyme activity, for antibodies that bind to a polypeptide of the invention, for nucleic acids that hybridize to a nucleic acid of the invention, to screen for cells expressing a polypeptide of the invention and the like. In addition to the array formats described in detail below for screening samples, alternative formats can also be used to practice the methods of the invention. Such formats include, for example, mass spectrometers, chromatographs, e.g., high-throughput HPLC and other forms of liquid chromatography, and smaller formats, such as 1536-well plates, 384-well plates and so on. High throughput screening apparatus can be adapted and used to practice the methods of the invention, see, e.g., U.S. Patent Application Nos. 20020001809; 20050272044.

[0606] Capillary Arrays

[0607] Nucleic acids or polypeptides of the invention can be immobilized to or applied to an array. Arrays can be used to screen for or monitor libraries of compositions (e.g., small molecules, antibodies, nucleic acids, etc.) for their ability to bind to or modulate the activity of a nucleic acid or a polypeptide of the invention. Capillary arrays, such as the GIGAMATRIX™, Verenium Corporation, San Diego, Calif.; and arrays described in, e.g., U.S. Patent Application No. 20020080350 A1; WO 0231203 A; WO 0244336 A, provide an alternative apparatus for holding and screening samples. In one aspect, the capillary array includes a plurality of capillaries formed into an array of adjacent capillaries, wherein each capillary comprises at least one wall defining a lumen for retaining a sample. The lumen may be cylindrical, square, hexagonal or any other geometric shape so long as the walls form a lumen for retention of a liquid or sample. The capillaries of the capillary array can be held together in close proximity to form a planar structure. The capillaries can be bound together, by being fused (e.g., where the capillaries are made of glass), glued, bonded, or clamped side-by-side. Additionally, the capillary array can include interstitial material disposed between adjacent capillaries in the array, thereby forming a solid planar device containing a plurality of through-holes.

[0608] A capillary array can be formed of any number of individual capillaries, for example, a range from 100 to 4,000,000 capillaries. Further, a capillary array having about 100,000 or more individual capillaries can be formed into the standard size and shape of a Microtiter® plate for fitment into standard laboratory equipment. The lumens are filled manually or automatically using either capillary action or microinjection using a thin needle. Samples of interest may subsequently be removed from individual capillaries for further analysis or characterization. For example, a thin, needle-like probe is positioned in fluid communication with a selected capillary to either add or withdraw material from the lumen.

[0609] In a single-pot screening assay, the assay components are mixed yielding a solution of interest, prior to insertion into the capillary array. The lumen is filled by capillary action when at least a portion of the array is immersed into a solution of interest. Chemical or biological reactions and/or activity in each capillary are monitored for detectable events. A detectable event is often referred to as a “hit”, which can usually be distinguished from “non-hit” producing capillaries by optical detection. Thus, capillary arrays allow for massively parallel detection of “hits”.

[0610] In a multi-pot screening assay, a polypeptide or nucleic acid, e.g., a ligand, can be introduced into a first component, which is introduced into at least a portion of a capillary of a capillary array. An air bubble can then be introduced into the capillary behind the first component. A second component can then be introduced into the capillary, wherein the second component is separated from the first component by the air bubble. The first and second components can then be mixed by applying hydrostatic pressure to both sides of the capillary array to collapse the bubble. The capillary array is to then monitored for a detectable event resulting from reaction or non-reaction of the two components.

[0611] In a binding screening assay, a sample of interest can be introduced as a first liquid labeled with a detectable particle into a capillary of a capillary array, wherein the lumen of the capillary is coated with a binding material for binding the detectable particle to the lumen. The first liquid may then be removed from the capillary tube, wherein the bound detectable particle is maintained within the capillary, and a second liquid may be introduced into the capillary tube. The capillary is then monitored for a detectable event resulting from reaction or non-reaction of the particle with the second liquid.

[0612] Arrays, or “Biochips”

[0613] Nucleic acids or polypeptides of the invention can be immobilized to or applied to an array. Arrays can be used to screen for or monitor libraries of compositions (e.g., small molecules, antibodies, nucleic acids, etc.) for their ability to bind to or modulate the activity of a nucleic acid or a polypeptide of the invention. For example, in one aspect of the invention, a monitored parameter is transcript expression of a lignocellulosic enzyme, e.g., a glycosyl hydrolase, cellulase, endoglucanase, cellobiohydrolase, beta-glucosidase, xylanase, mannanse, β-xylosidase and/or arabinofuranosidase enzyme gene. One or more, or, all the transcripts of a cell can be measured by hybridization of a sample comprising transcripts of the cell, or, nucleic acids representative of or complementary to transcripts of a cell, by hybridization to immobilized nucleic acids on an array, or “biochip.” By using an “array” of nucleic acids on a microchip, some or all of the transcripts of a cell can be simultaneously quantified. Alternatively, arrays comprising genomic nucleic acid can also be used to determine the genotype of a newly engineered strain made by the methods of the invention. Polypeptide arrays” can also be used to simultaneously quantify a plurality of proteins. The present invention can be practiced with any known “array,” also referred to as a “microarray” or “nucleic acid array” or “polypeptide array” or “antibody array” or “biochip,” or variation thereof. Arrays are generically a plurality of “spots” or “target elements,” each target element comprising a defined amount of one or more biological molecules, e.g., oligonucleotides, immobilized onto a defined area of a substrate surface for specific binding to a sample molecule, e.g., mRNA transcripts.

[0614] The terms “array” or “microarray” or “biochip” or “chip” as used herein is a plurality of target elements, each target element comprising a defined amount of one or more polypeptides (including antibodies) or nucleic acids immobilized onto a defined area of a substrate surface, as discussed in further detail, below.

[0615] In practicing the methods of the invention, any known array and/or method of making and using arrays can be incorporated in whole or in part, or variations thereof, as described, for example, in U.S. Pat. Nos. 6,277,628; 6,277,489; 6,261,776; 6,258,606; 6,054,270; 6,048,695; 6,045,996; 6,022,963; 6,013,440; 5,965,452; 5,959,098; 5,856,174; 5,830,645; 5,770,456; 5,632,957; 5,556,752; 5,143,854; 5,807,522; 5,800,992; 5,744,305; 5,700,637; 5,556,752; 5,434,049; see also, e.g., WO 99/51773; WO 99/09217; WO 97/46313; WO 96/17958; see also, e.g., Johnston (1998) Curr. Biol. 8:R171-R174; Schummer (1997) Biotechniques 23:1087-1092; Kern (1997) Biotechniques 23:120-124; Solinas-Toldo (1997) Genes, Chromosomes & Cancer 20:399-407; Bowtell (1999) Nature Genetics Supp. 21:25-32. See also published U.S. patent applications Nos. 20010018642; 20010019827; 20010016322; 20010014449; 20010014448; 20010012537; 20010008765.

### Antibodies and Antibody-Based Screening Methods

[0616] The invention provides isolated, synthetic or recombinant antibodies that specifically bind to a lignocellulosic enzyme, e.g., a glycosyl hydrolase, cellulase, endoglucanase, cellobiohydrolase, beta-glucosidase, xylanase, mannanse, β-xylosidase and/or arabinofuranosidase enzyme of the invention. These antibodies can be used to isolate, identify or quantify the lignocellulosic enzyme of the invention or related polypeptides. These antibodies can be used to isolate other polypeptides within the scope the invention or other related the lignocellulosic enzymes. The antibodies can be designed to bind to an active site of a lignocellulosic enzyme. Thus, the invention provides methods of inhibiting the lignocellulosic enzyme using the antibodies of the invention (see discussion above regarding applications for anti-cellulase, e.g., anti-endoglucanase, anti-cellobiohydrolase and/or anti-beta-glucosidase enzyme compositions of the invention).

[0617] The term “antibody” includes a peptide or polypeptide derived from, modeled after or substantially encoded by an immunoglobulin gene or immunoglobulin genes, or fragments thereof, capable of specifically binding an antigen or epitope, see, e.g. Fundamental Immunology, Third Edition, W. E. Paul, ed., Raven Press, N.Y. (1993); Wilson (1994) J. Immunol. Methods 175:267-273; Yarmush (1992) J. Biochem. Biophys. Methods 25:85-97. The term antibody includes antigen-binding portions, i.e., “antigen binding sites,” (e.g., fragments, subsequences, complementarity determining regions (CDRs)) that retain capacity to bind antigen, including (i) a Fab fragment, a monovalent fragment consisting of the VL, VH, CL and CH1 domains; (ii) a F(ab′)2 fragment, a bivalent fragment comprising two Fab fragments linked by a disulfide bridge at the hinge region; (iii) a Fd fragment consisting of the VH and CH1 domains; (iv) a Fv fragment consisting of the VL and VH domains of a single arm of an antibody, (v) a dAb fragment (Ward et al., (1989) Nature 341:544-546), which consists of a VH domain; and (vi) an isolated complementarity determining region (CDR). Single chain antibodies are also included by reference in the term “antibody.”

[0618] The invention provides fragments of the enzymes of the invention (e.g., peptides) including immunogenic fragments (e.g., subsequences) of a polypeptide of the invention. The invention provides compositions comprising a polypeptide or peptide of the invention and adjuvants or carriers and the like.

[0619] The antibodies can be used in immunoprecipitation, staining, immunoaffinity columns, and the like. If desired, nucleic acid sequences encoding for specific antigens can be generated by immunization followed by isolation of polypeptide or nucleic acid, amplification or cloning and immobilization of polypeptide onto an array of the invention. Alternatively, the methods of the invention can be used to modify the structure of an antibody produced by a cell to be modified, e.g., an antibody's affinity can be increased or decreased. Furthermore, the ability to make or modify antibodies can be a phenotype engineered into a cell by the methods of the invention.

[0620] Methods of immunization, producing and isolating antibodies (polyclonal and monoclonal) are known to those of skill in the art and described in the scientific and patent literature, see, e.g., Coligan, CURRENT PROTOCOLS IN IMMUNOLOGY, Wiley/Greene, NY (1991); Stites (eds.) BASIC AND CLINICAL IMMUNOLOGY (7th ed.) Lange Medical Publications, Los Altos, Calif. (“Stites”); Goding, MONOCLONAL ANTIBODIES: PRINCIPLES AND PRACTICE (2d ed.) Academic Press, New York, N.Y. (1986); Kohler (1975) Nature 256:495; Harlow (1988) ANTIBODIES, A LABORATORY MANUAL, Cold Spring Harbor Publications, New York. Antibodies also can be generated in vitro, e.g., using recombinant antibody binding site expressing phage display libraries, in addition to the traditional in vivo methods using animals. See, e.g., Hoogenboom (1997) Trends Biotechnol. 15:62-70; Katz (1997) Annu. Rev. Biophys. Biomol. Struct. 26:27-45.

[0621] The polypeptides of the invention or fragments comprising at least 5, 10, 15, 20, 25, 30, 35, 40, 50, 75, 100, or 150 consecutive amino acids thereof, may also be used to generate antibodies which bind specifically to the polypeptides or fragments. The resulting antibodies may be used in immunoaffinity chromatography procedures to isolate or purify the polypeptide or to determine whether the polypeptide is present in a biological sample. In such procedures, a protein preparation, such as an extract, or a biological sample is contacted with an antibody capable of specifically binding to one of the polypeptides of the invention, or fragments comprising at least 5, 10, 15, 20, 25, 30, 35, 40, 50, 75, 100, or 150 consecutive amino acids thereof.

[0622] In immunoaffinity procedures, the antibody is attached to a solid support, such as a bead or other column matrix. The protein preparation is placed in contact with the antibody under conditions in which the antibody specifically binds to one of the polypeptides of the invention, or fragment thereof. After a wash to remove non-specifically bound proteins, the specifically bound polypeptides are eluted.

[0623] The ability of proteins in a biological sample to bind to the antibody may be determined using any of a variety of procedures familiar to those skilled in the art. For example, binding may be determined by labeling the antibody with a detectable label such as a fluorescent agent, an enzymatic label, or a radioisotope. Alternatively, binding of the antibody to the sample may be detected using a secondary antibody having such a detectable label thereon. Particular assays include ELISA assays, sandwich assays, radioimmunoassays and Western Blots.

[0624] Polyclonal antibodies generated against the polypeptides of the invention, or fragments comprising at least 5, 10, 15, 20, 25, 30, 35, 40, 50, 75, 100, or 150 consecutive amino acids thereof can be obtained by direct injection of the polypeptides into an animal or by administering the polypeptides to an animal, for example, a nonhuman. The antibody so obtained can bind the polypeptide itself. In this manner, even a sequence encoding only a fragment of the polypeptide can be used to generate antibodies which may bind to the whole native polypeptide. Such antibodies can then be used to isolate the polypeptide from cells expressing that polypeptide.

[0625] For preparation of monoclonal antibodies, any technique which provides antibodies produced by continuous cell line cultures can be used. Examples include the hybridoma technique (Kohler and Milstein, Nature, 256:495-497, 1975), the trioma technique, the human B-cell hybridoma technique (Kozbor et al., Immunology Today 4:72, 1983) and the EBV-hybridoma technique (Cole, et al., 1985, in Monoclonal Antibodies and Cancer Therapy, Alan R. Liss, Inc., pp. 77-96).

[0626] Techniques described for the production of single chain antibodies (U.S. Pat. No. 4,946,778) can be adapted to produce single chain antibodies to the polypeptides of the invention, or fragments comprising at least 5, 10, 15, 20, 25, 30, 35, 40, 50, 75, 100, or 150 consecutive amino acids thereof. Alternatively, transgenic mice may be used to express humanized antibodies to these polypeptides or fragments thereof.

[0627] Antibodies generated against the polypeptides of the invention, or fragments comprising at least 5, 10, 15, 20, 25, 30, 35, 40, 50, 75, 100, or 150 consecutive amino acids thereof may be used in screening for similar polypeptides from other organisms and samples. In such techniques, polypeptides from the organism are contacted with the antibody and those polypeptides which specifically bind the antibody are detected. Any of the procedures described above may be used to detect antibody binding. One such screening assay is described in “Methods for Measuring Cellulase Activities”, Methods in Enzymology, Vol 160, pp. 87-116.

### Kits

[0628] The invention provides kits comprising the compositions, e.g., nucleic acids, expression cassettes, vectors, cells, transgenic seeds or plants or plant parts, polypeptides (e.g., a cellulase enzyme) and/or antibodies of the invention. The kits also can contain instructional material teaching the methodologies and industrial, medical and dietary uses of the invention, as described herein.

### Whole Cell Engineering and Measuring Metabolic Parameters

[0629] The methods of the invention provide whole cell evolution, or whole cell engineering, of a cell to develop a new cell strain having a new phenotype, e.g., a new or modified the lignocellulosic enzyme, e.g., glycosyl hydrolase, cellulase, endoglucanase, cellobiohydrolase, beta-glucosidase, xylanase, mannanse, β-xylosidase and/or arabinofuranosidase enzyme activity, by modifying the genetic composition of the cell. See U.S. patent application no. 20040033975.

[0630] The genetic composition can be modified by addition to the cell of a nucleic acid of the invention, e.g., a coding sequence for an enzyme of the invention. See, e.g., WO0229032; WO0196551.

[0631] To detect the new phenotype, at least one metabolic parameter of a modified cell is monitored in the cell in a “real time” or “on-line” time frame. In one aspect, a plurality of cells, such as a cell culture, is monitored in “real time” or “on-line.” In one aspect, a plurality of metabolic parameters is monitored in “real time” or “on-line.” Metabolic parameters can be monitored using the lignocellulosic enzyme, e.g., glycosyl hydrolase, cellulase, endoglucanase, cellobiohydrolase, beta-glucosidase, xylanase, mannanse, β-xylosidase and/or arabinofuranosidase enzymes of the invention.

[0632] Metabolic flux analysis (MFA) is based on a known biochemistry framework. A linearly independent metabolic matrix is constructed based on the law of mass conservation and on the pseudo-steady state hypothesis (PSSH) on the intracellular metabolites. In practicing the methods of the invention, metabolic networks are established, including the:
[0633] identity of all pathway substrates, products and intermediary metabolites
[0634] identity of all the chemical reactions interconverting the pathway metabolites, the stoichiometry of the pathway reactions,
[0635] identity of all the enzymes catalyzing the reactions, the enzyme reaction kinetics,
[0636] the regulatory interactions between pathway components, e.g. allosteric interactions, enzyme-enzyme interactions etc,
[0637] intracellular compartmentalization of enzymes or any other supramolecular organization of the enzymes, and,
[0638] the presence of any concentration gradients of metabolites, enzymes or effector molecules or diffusion barriers to their movement.

[0639] Once the metabolic network for a given strain is built, mathematic presentation by matrix notion can be introduced to estimate the intracellular metabolic fluxes if the on-line metabolome data is available. Metabolic phenotype relies on the changes of the whole metabolic network within a cell. Metabolic phenotype relies on the change of pathway utilization with respect to environmental conditions, genetic regulation, developmental state and the genotype, etc. In one aspect of the methods of the invention, after the on-line MFA calculation, the dynamic behavior of the cells, their phenotype and other properties are analyzed by investigating the pathway utilization. For example, if the glucose supply is increased and the oxygen decreased during the yeast fermentation, the utilization of respiratory pathways will be reduced and/or stopped, and the utilization of the fermentative pathways will dominate. Control of physiological state of cell cultures will become possible after the pathway analysis. The methods of the invention can help determine how to manipulate the fermentation by determining how to change the substrate supply, temperature, use of inducers, etc. to control the physiological state of cells to move along desirable direction. In practicing the methods of the invention, the MFA results can also be compared with transcriptome and proteome data to design experiments and protocols for metabolic engineering or gene shuffling, etc.

[0640] In practicing the methods of the invention, any modified or new phenotype can be conferred and detected, including new or improved characteristics in the cell. Any aspect of metabolism or growth can be monitored.

[0641] Monitoring Expression of an mRNA Transcript

[0642] In one aspect of the invention, the engineered phenotype comprises increasing or decreasing the expression of an mRNA transcript (e.g., a lignocellulosic enzyme, e.g., a glycosyl hydrolase, cellulase, endoglucanase, cellobiohydrolase, beta-glucosidase, xylanase, mannanse, β-xylosidase and/or arabinofuranosidase enzyme message) or generating new (e.g., the lignocellulosic enzyme transcripts in a cell. This increased or decreased expression can be traced by testing for the presence of a lignocellulosic enzyme of the invention or by the lignocellulosic enzyme activity assays. mRNA transcripts, or messages, also can be detected and quantified by any method known in the art, including, e.g., Northern blots, quantitative amplification reactions, hybridization to arrays, and the like. Quantitative amplification reactions include, e.g., quantitative PCR, including, e.g., quantitative reverse transcription polymerase chain reaction, or RT-PCR; quantitative real time RT-PCR, or “real-time kinetic RT-PCR” (see, e.g., Kreuzer (2001) Br. J. Haematol. 114:313-318; Xia (2001) Transplantation 72:907-914).

[0643] In one aspect of the invention, the engineered phenotype is generated by knocking out expression of a homologous gene. The gene's coding sequence or one or more transcriptional control elements can be knocked out, e.g., promoters or enhancers. Thus, the expression of a transcript can be completely ablated or only decreased.

[0644] In one aspect of the invention, the engineered phenotype comprises increasing the expression of a homologous gene. This can be effected by knocking out of a negative control element, including a transcriptional regulatory element acting in cis- or trans- , or, mutagenizing a positive control element. One or more, or, all the transcripts of a cell can be measured by hybridization of a sample comprising transcripts of the cell, or, nucleic acids representative of or complementary to transcripts of a cell, by hybridization to immobilized nucleic acids on an array.

[0645] Monitoring Expression of a Polypeptides, Peptides and Amino Acids

[0646] In one aspect of the invention, the engineered phenotype comprises increasing or decreasing the expression of a polypeptide (e.g., a lignocellulosic enzyme, e.g., a glycosyl hydrolase, cellulase, endoglucanase, cellobiohydrolase, beta-glucosidase, xylanase, mannanse, β-xylosidase and/or arabinofuranosidase enzyme) or generating new polypeptides in a cell. This increased or decreased expression can be traced by determining the amount of the lignocellulosic enzyme present or by the lignocellulosic enzyme activity assays. Polypeptides, peptides and amino acids also can be detected and quantified by any method known in the art, including, e.g., nuclear magnetic resonance (NMR), spectrophotometry, radiography (protein radiolabeling), electrophoresis, capillary electrophoresis, high performance liquid chromatography (HPLC), thin layer chromatography (TLC), hyperdiffusion chromatography, various immunological methods, e.g. immunoprecipitation, immunodiffusion, immuno-electrophoresis, radioimmunoassays (RIAs), enzyme-linked immunosorbent assays (ELISAs), immuno-fluorescent assays, gel electrophoresis (e.g., SDS-PAGE), staining with antibodies, fluorescent activated cell sorter (FACS), pyrolysis mass spectrometry, Fourier-Transform Infrared Spectrometry, Raman spectrometry, GC-MS, and LC-Electrospray and cap-LC-tandem-electrospray mass spectrometries, and the like. Novel bioactivities can also be screened using methods, or variations thereof, described in U.S. Pat. No. 6,057,103. Furthermore, as discussed below in detail, one or more, or, all the polypeptides of a cell can be measured using a protein array.

### Industrial, Energy, Pharmaceutical and Other Applications

[0647] Polypeptides of the invention (e.g., having the lignocellulosic enzyme, e.g., glycosyl hydrolase, cellulase, endoglucanase, cellobiohydrolase, beta-glucosidase, xylanase, mannanse, β-xylosidase and/or arabinofuranosidase) can catalyze the breakdown of cellulose. The enzymes of the invention can be highly selective catalysts. The invention provides industrial processes using enzymes of the invention, e.g., in the pharmaceutical or nutrient (diet) supplement industry, the energy industry (e.g., to make “clean” biofuels), in the food and feed industries, e.g., in methods for making food and feed products and food and feed additives. In one aspect, the invention provides processes using enzymes of the invention in the medical industry, e.g., to make pharmaceuticals or dietary aids or supplements, or food supplements and additives. In addition, the invention provides methods for using the enzymes of the invention in biofuel production, including, e.g., a bioalcohol such as bioethanol, biomethanol, biobutanol or biopropanol, thus comprising a “clean” fuel production.

[0648] The enzymes of the invention can catalyze reactions with exquisite stereo-, regio- and chemo-selectivities. The lignocellulosic enzyme, e.g., glycosyl hydrolase, cellulase, endoglucanase, cellobiohydrolase, beta-glucosidase, xylanase, mannanse, β-xylosidase and/or arabinofuranosidase enzymes of the invention can be engineered to function in various solvents, operate at extreme pHs (for example, high pHs and low pHs) extreme temperatures (for example, high temperatures and low temperatures), extreme salinity levels (for example, high salinity and low salinity) and catalyze reactions with compounds that are structurally unrelated to their natural, physiological substrates.

[0649] Biomass Conversion and Production of Clean Bio Fuels

[0650] The invention provides enzymes (including mixtures, or “cocktails” of enzymes) and methods for the conversion of a biomass or any lignocellulosic material (e.g., any composition comprising cellulose, hemicellulose and lignin), to fermentable sugars, and/or monomeric sugars—and eventually to fuels (e.g., bioethanol, methanol, propanol, butanol) and the like), feeds, foods and chemicals or any other useful product. Thus, the compositions and methods of the invention provide effective and sustainable alternatives or adjuncts to use of petroleum-based products, e.g., as a mixture of a biofuel (e.g., an alcohol such as bioethanol, propanol, butanol, methanol and the like) and gasoline.

[0651] The invention provides organisms expressing enzymes and antibodies of the invention, e.g., as cell, cell culture, or transgenic plant or plant part (e.g., a seed or fruit) “production factories” for the synthesis of polypeptides of the invention (e.g., as means for the upscale, high yield manufacturing of polypeptides of the invention), or for participation of the enzyme or antibody of the invention in chemical cycles involving a natural biomass conversion, processing or other manipulation.

[0652] In one aspect, enzymes and methods for the conversion are used in enzyme ensembles (“mixtures” or “cocktails”) for the efficient hydrolysis (e.g., depolymerization) of lignocellulosic, cellulosic and/or hemicellulosic polymers to metabolizeable carbon moieties, including sugars and alcohols. Exemplary enzyme cocktails are described herein; however, the invention encompasses compositions comprising mixtures of enzymes comprising at least one (any combination of) enzyme(s) of the invention; and in alternative embodiments, a mixture (“ensembles” or “cocktails”) of the invention can also comprise any other enzyme, e.g., a glucose oxidase, a phosphorylase, and amidase, etc., and the like. As discussed above, the invention provides methods for discovering and implementing the most effective of enzymes to enable these important new “biomass conversion”, “biomass processing” and alternative energy, or biofuel production, industrial processes.

[0653] In one aspect, polypeptides of the invention having lignocellulosic activity, e.g., glucosyl hydrolase, cellulase, endoglucanase, cellobiohydrolase and/or β-glucosidase (beta-glucosidase) activity, are used in processes for converting lignocellulosic biomass to monomeric sugars, which are eventually converted to a bioalcohol, e.g., ethanol, methanol, etc. Thus, the invention provides processes for making biofuels comprising, e.g., a bioalcohol such as bioethanol, biomethanol, biobutanol or biopropanol, from compositions comprising lignocellulosic biomass. The lignocellulose biomass material is can be obtained from agricultural crops, as a byproduct of food or feed production, or as lignocellulosic waste products, such as plant residues (e.g., sugarcane bagasse or corn fiber, such as corn seed fiber) and waste paper. Examples of suitable plant residues for treatment with polypeptides of the invention include sugarcane (e.g., bagasse, cane tops), grains, seeds, stems, leaves, hulls, husks, corn or corn cobs, corn stover, corn fiber, hay or straw (e.g., a rice straw or a wheat straw, or any the dry stalk of any cereal plant), grasses (e.g., Indian grass, such as Sorghastrum nutans; or, switch grass, e.g., Panicum species, such as Panicum virgatum), sugar beet pulp, citrus pulp, citrus peels, and the like, as well as wood, wood thinnings, wood waste, wood chips, wood pulp, pulp waste, wood waste, wood shavings, sawdust, construction and/or demolition wastes and debris (e.g. wood, wood shavings and sawdust). Examples of paper or wood waste suitable for treatment with polypeptides of the invention include discarded or used photocopy paper, computer printer paper, notebook paper, notepad paper, typewriter paper, and the like, as well as newspapers, magazines, cardboard, and paper-based packaging materials and recycled paper materials. In addition, urban wastes, e.g. the paper fraction of municipal solid waste, municipal wood waste, and municipal green waste, along with other materials containing sugar, starch, and/or cellulose can be used

[0654] The enzymes of the invention used to treat or process the lignocellulose biomass material (e.g., from agricultural crops, food or feed production byproduct, lignocellulosic waste products, plant residues, sugarcane bagasse, corn or corn fiber, waste wood or paper, etc.), in addition to being directly added to the material, alternatively can be made by a microorganism (e.g., a virus, plant, yeast, etc.) living on or within the biomass material, or by the biomass material itself, e.g., as a transgenic plant or seed and the like. In one aspect, microorganisms that produce the enzyme (e.g., by spraying, infecting, etc.) are added to the biomass material to be processed—this can be the sole source of the enzyme, or can supplement enzyme that is added in another form (e.g., as either a purified enzyme, or in crude lysate of a culture, such as a bacterial, yeast or insect cell culture, or any other formulation), or to supplement the presence of the enzyme as a heterologous recombinant protein in a transgenic plant. Alternatively, io the plant can be engineered to express the enzyme recombinantly by transient infection, transformation or transduction with naked DNA, plasmid, virus and the like. Alternatively, the enzymes are produced in plants or plant seeds, like corn, and then the enzyme can be isolated from the plant or the plant can be used directly in the process. In alternative embodiments, the enzymes of the invention can be added to the treatment process in batches, by fed-batch processes, added continually and/or be recycled during the process.

[0655] Enzymes and methods of the invention can be used in conjunction with any sugar production process, e.g., in a typical cane sugar production plant, where sugarcane processing is focused on the production of cane sugar (sucrose) from sugarcane; e.g., as illustrated in FIGS. 5A and 5B (both exemplary feedstock to sugar to bioalcohol, e.g., ethanol, methanol, etc., processes of the invention) and 5C (an exemplary dry milling process of the invention). One or more polypeptides (e.g., enzymes) of the invention can be added in one, any, some, or all of the steps illustrated in FIGS. 5A, 5B and/or 5C. Other products of these exemplary processes of the invention can include; ethanol, bagasse, and molasses. In one aspect, bagasse, the residual fibrous component of the sugarcane is used as a fuel source for the boilers in the generation of process steam. In alternative aspects, molasses is produced in two forms: inedible form (edible for animals; blackstrap) or as (human) edible syrup. Blackstrap molasses is used primarily as an animal feed additive, but it is also used to produce ethanol. Edible molasses syrups can be blended with maple syrup, invert sugars, or corn syrup.

[0656] In one exemplary process, the cane is received at the mill and prepared for the extraction of the juice. The milling process can occur in two steps: breaking the hard structure of the cane and grinding the cane. Imbibition is the process in which water is applied to the crushed cane to enhance the extraction of the juice. The leftover material after the crushing step is called bagasse, which is burnt in the boilers to produce steam and electricity. The extracted juice is strained to remove large particles and then clarified. In raw sugar production, the clarification is done almost exclusively with heat and lime, and small quantities of soluble phosphate also may be added. The lime is added to neutralize the organic acids, and the temperature is raised to approximately 95° C. A heavy precipitate is formed, which is separated from the juice in the clarifier. Clarified juice is transferred to the evaporators without further treatment. Evaporation is performed in two stages: initially in an evaporator to concentrate the juice and then in vacuum pans to crystallize the sugar. The evaporator station typically produces syrup with about 65% solids and 35% water. Following evaporation, the syrup is clarified by adding lime, phosphoric acid and a polymer flocculent, aerated, and filtered in the clarifier. From the clarifier, the syrup goes to the vacuum pans for crystallization. In the pans, the syrup is evaporated and the crystallization process is initiated. When the volume of the mixture of liquor and crystals, known as massecuite reaches capacity the contents are discharged to the crystallizer. From the crystallizer, the massecuite A is transferred to high speed centrifugal machine, in which the liquor (A molasses) is separated from the crystals. A molasses is returned to a vacuum pan and reboiled to yield B massecuite that yields a second batch of crystals and B molasses after centrifugation. B molasses is much lower purity than A molasses and it undergoes reboiling to form a lower grade massecuite C, which goes to a crystallizer and then to a centrifugal. The final molasses from the third stage (blackstrap molasses) is a heavy, viscous material used primarily to produce ethanol and as an additive in cattle feed. The cane sugar from the combined A and B massecuite is cooled and transported to sugar refinery.

[0657] In one aspect, the enzymes and methods of the invention can be used in conjunction with more “traditional” means of making a bioalcohol, e.g., ethanol, methanol, etc., from biomass, e.g., as methods comprising hydrolyzing lignocellulosic materials by subjecting dried lignocellulosic material in a reactor to a catalyst comprised of a dilute solution of a strong acid and a metal salt; this can lower the activation energy, or the temperature, of cellulose hydrolysis to obtain higher sugar yields; see, e.g., U.S. Pat. Nos. 6,660,506; 6,423,145.

[0658] Another exemplary method that incorporated use of enzymes of the invention comprises hydrolyzing lignocellulosic material containing hemicellulose, cellulose and lignin by subjecting the material to a first stage hydrolysis step in an aqueous medium at a temperature and a pressure chosen to effect primarily depolymerization of hemicellulose without major depolymerization of cellulose to glucose. This step results in a slurry in which the liquid aqueous phase contains dissolved monosaccharides resulting from depolymerization of hemicellulose and a solid phase containing cellulose and lignin. A second stage hydrolysis step can comprise conditions such that at least a major portion of the cellulose is depolymerized, such step resulting in a liquid aqueous phase containing dissolved/ soluble depolymerization products of cellulose. See, e.g., U.S. Pat. No. 5,536,325. Enzymes of the invention can be added at any stage of this exemplary process.

[0659] Another exemplary method that incorporated use of enzymes of the invention comprises processing a lignocellulose-containing biomass material by one or more stages of dilute acid hydrolysis with about 0.4% to 2% strong acid; and treating an unreacted solid lignocellulosic component of the acid hydrolyzed biomass material by alkaline delignification to produce precursors for biodegradable thermoplastics and derivatives. See, e.g., U.S. Pat. No. 6,409,841. Enzymes of the invention can be added at any stage of this exemplary process.

[0660] Another exemplary method that incorporated use of enzymes of the invention comprises prehydrolyzing lignocellulosic material in a prehydrolysis reactor; adding an acidic liquid to the solid lignocellulosic material to make a mixture; heating the mixture to reaction temperature; maintaining reaction temperature for time sufficient to fractionate the lignocellulosic material into a solubilized portion containing at least about 20% of the lignin from the lignocellulosic material and a solid fraction containing cellulose; removing a solubilized portion from the solid fraction while at or near reaction temperature wherein the cellulose in the solid fraction is rendered more amenable to enzymatic digestion; and recovering a solubilized portion. See, e.g., U.S. Pat. No. 5,705,369. Enzymes of the invention can be added at any stage of this exemplary process.

[0661] The invention provides methods for making motor fuel compositions (e.g., for spark ignition motors) based on liquid hydrocarbons blended with a fuel grade alcohol made by using an enzyme or a method of the invention. In one aspect, the fuels made by use of an enzyme of the invention comprise, e.g., coal gas liquid- or natural gas liquid-ethanol blends. In one aspect, a co-solvent is biomass-derived 2-methyltetrahydrofuran (MTHF). See, e.g., U.S. Pat. No. 6,712,866.

[0662] Methods of the invention for the enzymatic degradation of lignocellulose, e.g., for production of sugars and/or ethanol from lignocellulosic material, can also comprise use of ultrasonic treatment of the biomass material; see, e.g., U.S. Pat. No. 6,333,181.

[0663] Another exemplary process for making a biofuel comprising a bioalcohol, e.g., ethanol, methanol, etc., using enzymes of the invention comprises pretreating a starting material comprising a lignocellulosic feedstock comprising at least hemicellulose and cellulose. In one aspect, the starting material comprises potatoes, soybean (rapeseed), barley, rye, corn, oats, wheat, beets or sugar cane or a component or waste or food or feed production byproduct. The starting material (“feedstock”) is reacted at conditions which disrupt the plant's fiber structure to effect at least a partial hydrolysis of the hemicellulose and cellulose. Disruptive conditions can comprise, e.g., subjecting the starting material to an average temperature of 180° C. to 270° C. at pH 0.5 to 2.5 for a period of about 5 seconds to 60 minutes; or, temperature of 220° C. to 270° C., at pH 0.5 to 2.5 for a period of 5 seconds to 120 seconds, or equivalent. This generates a feedstock with increased accessibility to being digested by an enzyme, e.g., a cellulase enzyme of the invention. U.S. Pat. No. 6,090,595.

[0664] Exemplary conditions for cellulase hydrolysis of lignocellulosic material include reactions at temperatures between about 30° C. and 48° C., and/or a pH between about 4.0 and 6.0. Other exemplary conditions include a temperature between about 30° C. and 60° C. and a pH between about 4.0 and 8.0.

[0665] Biofuels and Biologically Produced Alcohols

[0666] The invention provides biofuels and synthetic fuels, including liquids and gases (e.g., syngas) and biologically produced alcohols, and methods for making them, using the compositions (e.g., enzyme and nucleic acids, and transgenic plants, animal, seeds and microorganisms) and methods of the invention. The invention provides biofuels and biologically produced alcohols comprising enzymes, nucleic acids, transgenic plants, animals (e.g., microorganisms, such as bacteria or yeast) and/or seeds of the invention. In one aspect, these biofuels and biologically produced alcohols are produced from a biomass.

[0667] The invention provides biologically produced alcohols, such as ethanol, methanol, propanol and butanol produced by methods of the invention, which include the action of microbes and enzymes of the invention through fermentation (hydrolysis) to result in an alcohol fuel.

[0668] Biofuels as a Liquid or a Gas Gasoline

[0669] The invention provides biofuels and synthetic fuels in the form of a gas, or gasoline, e.g., a syngas. In one aspect, methods of the invention comprising use of enzymes of the invention for chemical cycles for natural biomass conversion, e.g., for the hydrolysis of a biomass to make a biofuel, e.g., a bioethanol, biopropanol, bio-butanol or a biomethanol, or a synthetic fuel, in the form of a liquid or as a gas, such as a “syngas”.

[0670] For example, invention provides methods for making biofuel gases and synthetic gas fuels (“syngas”) comprising a bioethanol, biopropanol, bio-butanol and/or a biomethanol made using a polypeptide of the invention, or made using a method of the invention; and in one aspect this biofuel gas of the invention is mixed with a natural gas (can also be produced from biomass), e.g., a hydrogen or a hydrocarbon-based gas fuel.

[0671] In one aspect, the invention provides methods for processing biomass to a synthetic fuel, e.g., a syngas, such as a syngas produced from a biomass by gasification. In one aspect, the invention provides methods for making an ethanol, propanol, butanol and/or methanol gas from a sugar cane, e.g., a bagasse. In one aspect, this fuel, or gas, is used as motor fuel, e.g., an automotive, truck, airplane, boat, small engine, etc. fuel. In one aspect, the invention provides methods for making an ethanol, propanol, butanol and/or methanol from a plant, e.g., corn, or a plant product, e.g., hay or straw (e.g., a rice straw or a wheat straw, or any the dry stalk of any cereal plant), or an agricultural waste product. Cellulosic ethanol, propanol, butanol and/or methanol can be manufactured from a plant, e.g., corn, or plant product, e.g., hay or straw, or an agricultural waste product (e.g., as processed by Iogen Corporation of Ontario, Canada).

[0672] In one aspect, the ethanol, propanol, butanol and/or methanol made using a method of composition of the invention can be used as a fuel (e.g., a gasoline) additive (e.g., an oxygenator) or in a direct use as a fuel. For example, a ethanol, propanol, butanol and/or methanol, including a fuel, made by a method of the invention can be mixed with ethyl tertiary butyl ether (ETBE), or an ETBE mixture such as ETBE containing 47% ethanol as a biofuel, or with MTBE (methyl tertiary-butyl ether). In another aspect, a ethanol, propanol, butanol and/or methanol, including a fuel, made by a method of the invention can be mixed with:

| IUPAC name | common name |
|---|---|
| but-1-ene | α-butylene |
| cis-but-2-ene | cis-β-butylene |
| trans-but-2-ene | trans-β-butylene |
| 2-methylpropene | Isobutylene |

[0673] A butanol and/or ethanol made by a method of the invention (e.g., using an enzyme of the invention) can be further processed using “A.B.E.” (Acetone, Butanol, Ethanol) fermentation; in one aspect, butanol being the only liquid product. In one aspect, this butanol and/or ethanol is burned “straight” in existing gasoline engines (without modification to the engine or car), produces more energy and is less corrosive and less water soluble than ethanol, and can be distributed via existing infrastructures.

[0674] The invention also provides mixed alcohols wherein one, several or all of the alcohols are made by processes comprising at least one method of the invention (e.g., using an enzyme of the invention), e.g., comprising a mixture of ethanol, propanol, butanol, pentanol, hexanol, and heptanol, such as ECALENE™ (Power Energy Fuels, Inc., Lakewood, Colo.), e.g.:

Exemplary Fuel of the Invention

| Component | Weight % |
|---|---|
| Methanol | 0% |
| Ethanol | 75% |
| Propanol | 9% |
| Butanol | 7% |
| Pentanol | 5% |
| Hexanol & Higher | 4% |

[0675] In one aspect, one, several or all of these alcohols are made by a process of the invention using an enzyme of the invention, and the process can further comprise a biomass-to-liquid technology, e.g., a gasification process to produce syngas followed by catalytic synthesis, or by a bioconversion of biomass to a mixed alcohol fuel.

[0676] The invention also provides processes comprising use of an enzyme of the invention incorporating (or, incorporated into) “gas to liquid”, or GTL; or “coal to liquid”, or CTL; or “biomass to liquid” or BTL; or “oilsands to liquid”, or OTL, processes; and in one aspect these processes of the invention are used to make synthetic fuels. In one aspect, one of these processes of the invention comprises making a biofuel (e.g., a synfuel) out of a biomass using, e.g., the so-called “Fischer Tropsch” process (a catalyzed chemical reaction in which carbon monoxide and hydrogen are converted into liquid hydrocarbons of various forms; typical catalysts used are based on iron and cobalt; the principal purpose of this process is to produce a synthetic petroleum substitute for use as synthetic lubrication oil or as synthetic fuel). In one aspect, this synthetic biofuel of the invention can contain oxygen and can be used as additive in high quality diesel and petrol.

[0677] Enzymatic Processes for Sugarcane Bagasse

[0678] The invention provides polypeptides that can enzymatically process (hydrolyze) sugarcane (Saccharum), sugarcane parts (e.g., cane tops) and/or sugarcane bagasse, i.e., for sugarcane degradation, or for biomass processing, and polynucleotides encoding these enzymes, and making and using these polynucleotides and polypeptides. The invention provides polypeptides and methods for processing lignocellulosic residues, including sugarcane bagasse, or any waste product of the sugar milling or related industries, into a lignocellulosic hydrolysis product, which itself can be a biofuel or which can be further processed to become a biofuel, including liquid or gas fuels. Because the invention provides enzymes and methods for sugar cane processing, it also provides methods for making (methods for the production of) edible sugar, garapa, rapadura (papelón), falernum, molasses, rum, cachaça, in addition to alcohols (for any purpose) and/or biofuels, e.g., bioethanol. Thus, the invention also provides edible sugar, garapa, rapadura (papelón), falernum, molasses, rum, cachaça, alcohols, biofuels, e.g., bioethanol and the like, and their intermediate, comprising a polypeptide of the invention.

[0679] In some aspects, are several advantages to using sugarcane, e.g., bagasse, as a substrate for bioconversion:
[0680] 1. It has high carbohydrate content (cellulose, 40-50%, and hemicellulose, 20-30%);
[0681] 2. It is collected at the site of processing;

[0682] 3. It is a cheap substrate, and there is a constant, although seasonal supply generated within the sugarcane industry.

[0683] The invention provides polypeptides and methods for hydrolyzing cellulose and hemicellulose polysaccharides in sugarcane, e.g., bagasse, which are associated with lignin, which can act as a barrier shielding the polysaccharides from attack by microorganisms and their associated enzyme systems. Because of the structural characteristics of lignocellulose, such as its lignin barrier and cellulose crystallinity, in one aspect a pretreatment process is used to enhance the access of enzyme(s) of this invention to the polysaccharide components in a biomass (a bagasse) to increase the conversion yields into the building block monosaccharides, such as hexose and pentose sugars. In one exemplary system of this invention using enzyme(s) of this invention, sugars produced are efficiently fermented to ethanol, and burning unhydrolyzed carbohydrate plus lignin provides enough steam to fuel the sugar mills.

[0684] In alternative aspects, the processes of the invention use various pretreatments, which can be grouped into three categories: physical, chemical, and multiple (physical+chemical). Any chemicals can be used as a pretreatment agent, e.g., acids, alkalis, gases, cellulose solvents, alcohols, oxidizing agents and reducing agents. Among these chemicals, alkali is the most popular pretreatment agent because it is relatively inexpensive and results in less cellulose degradation. The common alkalis sodium hydroxide and lime also can be used as pretreatment agents. Although sodium hydroxide increases biomass digestibility significantly, it is difficult to recycle, is relatively expensive, and is dangerous to handle. In contrast, lime has many advantages: it is safe and very inexpensive, and can be recovered by carbonating wash water with carbon dioxide.

[0685] In one aspect, the invention provides a multi-enzyme system (including at least one enzyme of this invention) that can hydrolyze polysaccharides in a sugarcane, e.g., bagasse, component of sugarcane processed in sugar mills. In one aspect, the sugarcane, e.g., bagasse, is processed by an enzyme of the invention made by an organism (e.g., transgenic animal, plants, transformed microorganism) and/or byproduct (e.g., harvested plant, fruit, seed) expressing an enzyme of the invention. In one aspect, the enzyme is a recombinant enzyme made by the plant or biomass which is to be processed to a fuel, e.g., the invention provides a transgenic sugarcane bagasse comprising an enzyme of the invention. In one aspect, these compositions and products used in methods of the invention comprising chemical cycles for natural biomass conversion, e.g., for the hydrolysis of a biomass to make a biofuel, e.g., bioethanol, biopropanol, bio-butanol, biomethanol, a synthetic fuel in the form of a liquid or a gas, such as a “syngas”.

[0686] In one aspect, the invention provides a biofuel, e.g., a biogas, produced by the process of anaerobic digestion of organic material by anaerobes, wherein the process comprises use of an enzyme of the invention or a method of the invention. This biofuel, e.g., a biogas, can be produced either from biodegradable waste materials or by the use of energy crops fed into anaerobic digesters to supplement gas yields. The solid output, digestate, can also be used as a biofuel.

[0687] In one aspect, the invention provides a biofuel, e.g., a biogas, comprising a methane, wherein the process comprises use of an enzyme of the invention or a method of the invention. This biofuel, e.g., a biogas, can be recovered in industrial anaerobic digesters and mechanical biological treatment systems. Landfill gas can be further processed using an enzyme of this invention or a process of this invention; before processing landfill gas can be a less clean form of biogas produced in landfills through naturally occurring anaerobic digestion. Paradoxically if landfill gas is allowed to escape into the atmosphere it is a potent greenhouse gas.

[0688] The invention provides methods for making biologically produced oils and gases from various wastes, wherein the process comprises use of an enzyme of the invention or a method of the invention. In one aspect, these methods comprise thermal depolymerization of waste to extract methane and other oils similar to petroleum; or, e.g., a bioreactor system that utilizes nontoxic photosynthetic algae to take in smokestacks flue gases and produce biofuels such as biodiesel, biogas and a dry fuel comparable to coal, e.g., as designed by GreenFuel Technologies Corporation, of Cambridge, Mass.

[0689] The invention provides methods for making biologically produced oils, including crude oils, and gases that can be used in diesel engines, wherein the process comprises use of an enzyme of the invention or a method of the invention. In one aspect, these methods can refine petroleum, e.g., crude oils, into kerosene, petroleum, diesel and other fractions.

[0690] The invention provides methods (using an enzyme of the invention or a method of the invention) for making biologically produced oils from:
[0691] Straight vegetable oil (SVO).
[0692] Waste vegetable oil (WVO)—waste cooking oils and greases produced in quantity mostly by commercial kitchens.
[0693] Biodiesel obtained from transesterification of animal fats and vegetable oil, directly usable in petroleum diesel engines.
[0694] Biologically derived crude oil, together with biogas and carbon solids via the thermal depolymerization of complex organic materials including non oil based materials; for example, waste products such as old tires, offal, wood and plastic.
[0695] Pyrolysis oil; which may be produced out of biomass, wood waste etc. using heat only in the flash pyrolysis process (the oil may have to be treated before using in conventional fuel systems or internal combustion engines).
[0696] Wood, charcoal, and dried dung.

[0697] Animal Feeds and Food or Feed Additives

[0698] In addition to providing dietary aids or supplements, or food supplements and additives for human use, the invention also provides compositions and methods for treating animal feeds and foods and food or feed additives using a polypeptide of the invention, e.g., a protein having a lignocellulosic activity, e.g., a glycosyl hydrolase, cellulase, endoglucanase, cellobiohydrolase, beta-glucosidase, xylanase, mannanse, β-xylosidase and/or arabinofuranosidase enzymes of the invention, and/or the antibodies of the invention. The invention provides animal feeds, foods, and additives comprising the lignocellulosic enzymes of the invention and/or antibodies of the invention. The animal can be any farm animal or any animal.

[0699] The animal feed additive of the invention may be a granulated enzyme product that may readily be mixed with feed components. Alternatively, feed additives of the invention can form a component of a pre-mix. The granulated enzyme product of the invention may be coated or uncoated. The particle size of the enzyme granulates can be compatible with that of feed and pre-mix components. This provides a safe and convenient mean of incorporating enzymes into feeds. Alternatively, the animal feed additive of the invention may be a stabilized liquid composition. This may be an aqueous or oil-based slurry. See, e.g., U.S. Pat. No. 6,245,546.

[0700] The lignocellulosic enzyme, e.g., glycosyl hydrolase, cellulase, endoglucanase, cellobiohydrolase, beta-glucosidase, xylanase, mannanse, β-xylosidase and/or arabinofuranosidase enzymes of the present invention, in the modification of animal feed or a food, can process the food or feed either in vitro (by modifying components of the feed or food) or in vivo. Polypeptides of the invention can be added to animal feed or food compositions.

[0701] In one aspect, an enzyme of the invention is added in combination with another enzyme, e.g., beta-galactosidases, catalases, laccases, other cellulases, endoglycosidases, endo-beta-1,4-laccases, amyloglucosidases, other glucosidases, glucose isomerases, glycosyltransferases, lipases, phospholipases, lipooxygenases, beta-laccases, endo-beta-1,3(4)-laccases, cutinases, peroxidases, amylases, glucoamylases, pectinases, reductases, oxidases, decarboxylases, phenoloxidases, ligninases, pullulanases, arabinanases, hemicellulases, mannanases, xylolaccases, xylanases, pectin acetyl esterases, rhamnogalacturonan acetyl esterases, proteases, peptidases, proteinases, polygalacturonases, rhamnogalacturonases, galactanases, pectin lyases, transglutaminases, pectin methylesterases, cellobiohydrolases, and/or glucose oxidases.

[0702] These enzyme digestion products are more digestible by the animal. Thus, the lignocellulosic enzyme, e.g., glycosyl hydrolase, cellulase, endoglucanase, cellobiohydrolase, beta-glucosidase, xylanase, mannanse, β-xylosidase and/or arabinofuranosidase enzymes of the invention can contribute to the available energy of the feed or food, or to the digestibility of the food or feed by breaking down cellulose.

[0703] In another aspect, the lignocellulosic enzyme, e.g., glycosyl hydrolase, cellulase, endoglucanase, cellobiohydrolase, beta-glucosidase, xylanase, mannanse, β-xylosidase and/or arabinofuranosidase enzyme of the invention can be supplied by expressing the enzymes directly in transgenic feed crops (as, e.g., transgenic plants, seeds and the like), to such as grains, cereals, corn, soy bean, rape seed, lupin and the like. As discussed above, the invention provides transgenic plants, plant parts and plant cells comprising a nucleic acid sequence encoding a polypeptide of the invention. In one aspect, the nucleic acid is expressed such that the lignocellulosic enzyme of the invention is produced in recoverable quantities. The lignocellulosic enzyme can be recovered from any plant or plant part. Alternatively, the plant or plant part containing the recombinant polypeptide can be used as such for improving the quality of a food or feed, e.g., improving nutritional value, palatability, etc.

[0704] In one aspect, the enzyme delivery matrix of the invention is in the form of discrete plural particles, pellets or granules. By “granules” is meant particles that are compressed or compacted, such as by a pelletizing, extrusion, or similar compacting to remove water from the matrix. Such compression or compacting of the particles also promotes intraparticle cohesion of the particles. For example, the granules can be prepared by pelletizing the grain-based substrate in a pellet mill. The pellets prepared thereby are ground or crumbled to a granule size suitable for use as an adjuvant in animal feed. Since the matrix is itself approved for use in animal feed, it can be used as a diluent for delivery of enzymes in animal feed.

[0705] In one aspect, the lignocellulosic enzyme, e.g., glycosyl hydrolase, cellulase, endoglucanase, cellobiohydrolase, beta-glucosidase, xylanase, mannanse, β-xylosidase and/or arabinofuranosidase enzyme contained in the invention enzyme delivery matrix and methods is a thermostable the lignocellulosic enzyme, as described herein, so as to resist inactivation of the lignocellulosic enzyme during manufacture where elevated temperatures and/or steam may be employed to prepare the palletized enzyme delivery matrix. During digestion of feed containing the invention enzyme delivery matrix, aqueous digestive fluids will cause release of the active enzyme. Other types of thermostable enzymes and nutritional supplements that are thermostable can also be incorporated in the delivery matrix for release under any type of aqueous conditions.

[0706] In one aspect, a coating is applied to the enzyme matrix particles for many different purposes, such as to add a flavor or nutrition supplement to animal feed, to delay release of animal feed supplements and enzymes in gastric conditions, and the like. In one aspect, the coating is applied to achieve a functional goal, for example, whenever it is desirable to slow release of the enzyme from the matrix particles or to control the conditions under which the enzyme will be released. The composition of the coating material can be such that it is selectively broken down by an agent to which it is to susceptible (such as heat, acid or base, enzymes or other chemicals). Alternatively, two or more coatings susceptible to different such breakdown agents may be consecutively applied to the matrix particles.

[0707] The invention is also directed towards a process for preparing an enzyme-releasing matrix. In accordance with the invention, the process comprises providing discrete plural particles of a grain-based substrate in a particle size suitable for use as an enzyme-releasing matrix, wherein the particles comprise a lignocellulosic enzyme, e.g., a glycosyl hydrolase, cellulase, endoglucanase, cellobiohydrolase, beta-glucosidase, xylanase, mannanse, β-xylosidase and/or arabinofuranosidase enzyme encoded by an amino acid sequence of the invention. In one aspect, the process includes compacting or compressing the particles of enzyme-releasing matrix into granules, which most in one aspect is accomplished by pelletizing. The mold inhibitor and cohesiveness agent, when used, can be added at any suitable time, and in one aspect are mixed with the grain-based substrate in the desired proportions prior to pelletizing of the grain-based substrate. Moisture content in the pellet mill feed in one aspect is in the ranges set forth above with respect to the moisture content in the finished product, and in one aspect is about 14-15%. In one aspect, moisture is added to the feedstock in the form of an aqueous preparation of the enzyme to bring the feedstock to this moisture content. The temperature in the pellet mill in one aspect is brought to about 82° C. with steam. The pellet mill may be operated under any conditions that impart sufficient work to the feedstock to provide pellets. The pelleting process itself is a cost-effective process for removing water from the enzyme-containing composition.

[0708] The compositions and methods of the invention can be practiced in conjunction with administration of prebiotics, which are high molecular weight sugars, e.g., fructo-oligosaccharides (FOS); galacto-oligosaccharides (GOS), GRAS (Generally Recognized As Safe) material. These prebiotics can be metabolized by some probiotic lactic acid bacteria (LAB). They are non-digestible by the majority of intestinal microbes.

[0709] Treating Foods and Food Processing

[0710] The invention provides foods and feeds comprising enzymes of the invention, and methods for using enzymes of the invention in processing foods and feeds. Cellulases, e.g., endoglucanase, cellobiohydrolase, beta-glucosidase, xylanase, mannanse, β-xylosidase and/or arabinofuranosidase enzymes of the invention have numerous applications in food processing industry. The invention provides methods for hydrolyzing cellulose-comprising compositions, including, e.g., a plant cell, a bacterial cell, a yeast cell, an insect cell, or an animal cell, or any plant or plant part, or any food or feed, a waste product and the like.

[0711] For example, the invention provides feeds or foods comprising a lignocellulosic enzyme of the invention, e.g., in a feed, a liquid, e.g., a beverage (such as a fruit juice or a beer), a bread or a dough or a bread product, or a drink (e.g., a beer) or a beverage precursor (e.g., a wort).

[0712] The food treatment processes of the invention can also include the use of any combination of other enzymes such as tryptophanases or tyrosine decarboxylases, laccases, catalases, laccases, other cellulases, endoglycosidases, endo-beta-1,4-laccases, amyloglucosidases, other glucosidases, glucose isomerases, glycosyltransferases, lipases, phospholipases, lipooxygenases, beta-laccases, endo-beta-1,3(4)-laccases, cutinases, peroxidases, amylases, glucoamylases, pectinases, reductases, oxidases, decarboxylases, phenoloxidases, ligninases, pullulanases, arabinanases, hemicellulases, mannanases, xylolaccases, xylanases, pectin acetyl esterases, rhamnogalacturonan acetyl esterases, proteases, peptidases, proteinases, polygalacturonases, rhamnogalacturonases, galactanases, pectin lyases, transglutaminases, pectin methylesterases, cellobiohydrolases, and/or glucose oxidases.

[0713] In one aspect, the invention provides enzymes and processes for hydrolyzing liquid (liquefied) and granular starch. Such starch can be derived from any source, e.g., beet, cane sugar, potato, corn, wheat, milo, sorghum, rye or bulgher. The invention applies to any plant starch source, e.g., a grain starch source, which is useful in liquefaction (for example, to make biofuels comprising, e.g., a bioalcohol such as bioethanol, biomethanol, biobutanol or biopropanol), including any other grain or vegetable source known to produce starch suitable for liquefaction. The methods of the invention comprise liquefying starch (e.g., making biofuels comprising, e.g., a bioalcohol such as bioethanol, biomethanol, biobutanol or biopropanol) from any natural material, such as rice, germinated rice, corn, barley, milo, wheat, legumes, potato, beet, cane sugar and sweet potato. The liquefying process can substantially hydrolyze the starch to produce a syrup. The temperature range of the liquefaction can be any liquefaction temperature which is known to be effective in liquefying starch. For example, the temperature of the starch can be between about 80° C. to about 115° C., between about 100° C. to about 110° C., and from about 105° C. to about 108° C. The bioalcohols made using the enzymes and processes of the invention can be used as fuels or in fuels (e.g., auto fuels), e.g., as discussed below, in addition to their use in (or for making) foods and feeds, including alcoholic beverages.

[0714] Waste Treatment

[0715] The invention provides enzymes for use in waste treatment. Cellulases, e.g., endoglucanase, cellobiohydrolase, beta-glucosidase, xylanase, mannanse, β-xylosidase and/or arabinofuranosidase enzymes of the invention can be used in a variety of waste treatment or related industrial applications, e.g., in waste treatment related to biomass conversion to generate fuels. For example, in one aspect, the invention provides a solid and/or liquid waste digestion process using the lignocellulosic enzyme of the invention. The methods can comprise reducing the mass and volume of substantially untreated solid waste. Solid waste can be treated with an enzymatic digestive process in the presence of an enzymatic solution (including the lignocellulosic enzymes of the invention) at a controlled temperature. This results in a reaction without appreciable bacterial fermentation from added microorganisms. The solid waste is converted into a liquefied waste and any residual solid waste. The resulting liquefied waste can be separated from said any residual solidified waste. See e.g., U.S. Pat. No. 5,709,796.

[0716] In one aspect, the compositions and methods of the invention are used for odor removal, odor prevention or odor reduction, e.g., in animal waste lagoons, e.g., on swine farms, in other agricultural, food or feed processing, in clothing and/or textile processing, cleaning or recycling, or other industrial processes.

[0717] The enzymes and methods for the conversion of biomass (e.g., lignocellulosic materials) to fuels (e.g., biofuels comprising, e.g., a bioalcohol such as bioethanol, biomethanol, biobutanol or biopropanol) can incorporate the treatment/recycling of municipal solid waste material, including waste obtained directly from a municipality or municipal solid waste that was previously land-filled and subsequently recovered, or sewage sludge, e.g., in the form of sewage sludge cake which contains substantial amounts of cellulosic material. Since sewage sludge cakes will normally not contain substantial amounts of recyclable materials (aluminum, glass, plastics, etc.), they can be directly treated with concentrated sulfuric acid (to reduce the heavy metal content of the cellulosic component of the waste) and processed in the ethanol production system. See, e.g., U.S. Pat. Nos. 6,267,309; 5,975,439.

[0718] Another exemplary method using enzymes of the invention for recovering organic and inorganic matter from waste material comprises sterilizing a solid organic matter and softening it by subjecting it to heat and pressure. This exemplary process may be carried out by first agitating waste material and then subjecting it to heat and pressure, which sterilizes it and softens the organic matter contained therein. In one aspect, after heating under pressure, the pressure may be suddenly released from a perforated chamber to forces the softened organic matter outwardly through perforations of the container, thus separating the organic matter from the solid inorganic matter. The softened sterilized, organic matter is then fermented in fermentation chamber, e.g., using enzymes of the invention, e.g., to form a mash. The mash may be subjected to further processing by centrifuge, distillation column and/or anaerobic digester to recover fuels such as ethanol and methane, and animal feed supplements. See, e.g., U.S. Pat. No. 6,251,643.

[0719] Enzymes of the invention can also be used in processes, e.g., pretreatments, to reduce the odor of an industrial waste, or a waste generated from an animal production facility, and the like. For example, enzymes of the invention can be used to treat an animal waste in a waste holding facility to enhance efficient degradation of large amounts of organic matter with reduced odor. The process can also include inoculation with sulfide-utilizing bacteria and organic digesting bacteria and lytic enzymes (in addition to an enzyme of the invention). See, e.g., U.S. Pat. No. 5,958,758.

[0720] Enzymes of the invention can also be used in mobile systems, e.g., batch type reactors, for bioremediation of aqueous, hazardous wastes, e.g., as described in U.S. Pat. No. 5,833,857. Batch type reactors can be large vessels having circulatory capability wherein bacteria (e.g., expressing an enzyme of the invention) are maintained in an efficient state by nutrients being feed into the reactor. Such systems can be used where effluent can be delivered to the reactor or the reactor is built into a waste water treatment system. Enzymes of the invention can also be used in treatment systems for use at small or temporary remote locations, e.g., portable, high volume, highly efficient, versatile waste water treatment systems.

[0721] The waste treatment processes of the invention can include the use of any combination of other enzymes such as other the lignocellulosic enzyme, e.g., glycosyl hydrolase, cellulase, endoglucanase, cellobiohydrolase, beta-glucosidase, xylanase, mannanse, β-xylosidase and/or arabinofuranosidase enzymes, catalases, laccases, other cellulases, endoglycosidases, endo-beta-1,4-laccases, amyloglucosidases, other glucosidases, glucose isomerases, glycosyltransferases, lipases, phospholipases, lipooxygenases, beta-laccases, endo-beta-1,3(4)-laccases, cutinases, peroxidases, amylases, glucoamylases, pectinases, reductases, oxidases, decarboxylases, phenoloxidases, ligninases, pullulanases, phytases, arabinanases, hemicellulases, mannanases, xylolaccases, xylanases, pectin acetyl esterases, rhamnogalacturonan acetyl esterases, proteases, peptidases, proteinases, polygalacturonases, rhamnogalacturonases, galactanases, pectin lyases, transglutaminases, pectin methylesterases, other cellobiohydrolases, and/or glucose oxidases.

[0722] Detergent Compositions

[0723] The invention provides detergent compositions comprising one or more polypeptides of the invention (e.g., enzymes having cellulase, endoglucanase, cellobiohydrolase, beta-glucosidase, xylanase, mannanse, β-xylosidase and/or arabinofuranosidase activity) and methods of making and using these compositions. The invention incorporates all methods of making and using detergent compositions, see, e.g., U.S. Pat. Nos. 6,413,928; 6,399,561; 6,365,561; 6,380,147. The detergent compositions can be a one and two part aqueous composition, a non-aqueous liquid composition, a cast solid, a granular form, a particulate form, a compressed tablet, a gel and/or a paste and a slurry form. The invention also provides methods capable of a rapid removal of gross food soils, films of food residue and other minor food compositions using these detergent compositions. Enzymes of the invention can facilitate the removal of starchy stains by means of catalytic hydrolysis of the starch polysaccharide. Enzymes of the invention can be used in dishwashing detergents in textile laundering detergents.

[0724] The actual active enzyme content depends upon the method of manufacture of a detergent composition and is not critical, assuming the detergent solution has the desired enzymatic activity. In one aspect, the amount of glucosidase present in the final solution ranges from about 0.001 mg to 0.5 mg per gram of the detergent composition. The particular enzyme chosen for use in the process and products of this invention depends upon the conditions of final utility, including the physical product form, use pH, use temperature, and soil types to be degraded or altered. The enzyme can be chosen to provide optimum activity and stability for any given set of utility conditions. In one aspect, the polypeptides of the present invention are active in the pH ranges of from about 4 to about 12 and in the temperature range of from about 20° C. to about 95° C. The detergents of the invention can comprise cationic, semi-polar nonionic or zwitterionic surfactants; or, mixtures thereof.

[0725] Enzymes of the present invention (e.g., enzymes having cellulase, endoglucanase, cellobiohydrolase, beta-glucosidase, xylanase, mannanse, β-xylosidase and/or arabinofuranosidase activity) can be formulated into powdered and liquid detergents having pH between 4.0 and 12.0 at levels of about 0.01 to about 5% (preferably 0.1% to 0.5%) by weight. These detergent compositions can also include other enzymes such as known proteases, cellulases, lipases or endoglycosidases, and/or glucose oxidases, as well as builders and stabilizers. The addition of enzymes of the invention to conventional cleaning compositions does not create any special use limitation. In other words, any temperature and pH suitable for the detergent is also suitable for the present compositions as long as the pH is within the above range, and the temperature is below the described enzyme's denaturing temperature. In addition, the polypeptides of the invention can be used in a cleaning composition without detergents, again either alone or in combination with builders and stabilizers.

[0726] The present invention provides cleaning compositions including detergent compositions for cleaning hard surfaces, detergent compositions for cleaning fabrics, dishwashing compositions, oral cleaning compositions, denture cleaning compositions, and contact lens cleaning solutions.

[0727] In one aspect, the invention provides a method for washing an object comprising contacting the object with a polypeptide of the invention under conditions sufficient for washing. A polypeptide of the invention may be included as a detergent additive. The detergent composition of the invention may, for example, be formulated as a hand or machine laundry detergent composition comprising a polypeptide of the invention. A laundry additive suitable for pre-treatment of stained fabrics can comprise a polypeptide of the invention. A fabric softener composition can comprise a polypeptide of the invention. Alternatively, a polypeptide of the invention can be formulated as a detergent composition for use in general household hard surface cleaning operations. In alternative aspects, detergent additives and detergent compositions of the invention may comprise one or more other enzymes such as a protease, a lipase, a cutinase, another glucosidase, a carbohydrase, another cellulase, a pectinase, a mannanase, an arabinase, a galactanase, a xylanase, an oxidase, e.g., a lactase, and/or a peroxidase, and/or glucose oxidase. The properties of the enzyme(s) of the invention are chosen to be compatible with the selected detergent (i.e. pH-optimum, compatibility with other enzymatic and non-enzymatic ingredients, etc.) and the enzyme(s) is present in effective amounts. In one aspect, enzymes of the invention are used to remove malodorous materials from fabrics. Various detergent compositions and methods for making them that can be used in practicing the invention are described in, e.g., U.S. Pat. Nos. 6,333,301; 6,329,333; 6,326,341; 6,297,038; 6,309,871; 6,204,232; 6,197,070; 5,856,164.

[0728] The detergents and related processes of the invention can also include the use of any combination of other enzymes such as tryptophanases or tyrosine decarboxylases, laccases, catalases, laccases, other cellulases, endoglycosidases, endo-beta-1,4-laccases, amyloglucosidases, other glucosidases, glucose isomerases, glycosyltransferases, lipases, phospholipases, lipooxygenases, beta-laccases, endo-beta-1,3(4)-laccases, cutinases, peroxidases, amylases, glucoamylases, pectinases, reductases, oxidases, decarboxylases, phenoloxidases, ligninases, pullulanases, arabinanases, hemicellulases, mannanases, xylolaccases, xylanases, pectin acetyl esterases, rhamnogalacturonan acetyl esterases, proteases, peptidases, proteinases, polygalacturonases, rhamnogalacturonases, galactanases, pectin lyases, transglutaminases, pectin methylesterases, other cellobiohydrolases, and/or glucose oxidases.

[0729] Treating Fabrics and Textiles

[0730] The invention provides methods of treating fabrics and textiles using one or more polypeptides of the invention, e.g., enzymes having cellulase, endoglucanase, cellobiohydrolase, beta-glucosidase, xylanase, mannanse, β-xylosidase and/or arabinofuranosidase activity. The polypeptides of the invention can be used in any fabric-treating method, which are well known in the art, see, e.g., U.S. Pat. No. 6,077,316. For example, in one aspect, the feel and appearance of a fabric is improved by a method comprising contacting the fabric with an enzyme of the invention in a solution. In one aspect, the fabric is treated with the solution under pressure.

[0731] In one aspect, the enzymes of the invention are applied during or after the weaving of textiles, or during the desizing stage, or one or more additional fabric processing steps. During the weaving of textiles, the threads are exposed to considerable mechanical strain. Prior to weaving on mechanical looms, warp yarns are often coated with sizing starch or starch derivatives in order to increase their tensile strength and to prevent breaking. The enzymes of the invention can be applied to remove these sizing starch or starch derivatives. After the textiles have been woven, a fabric can proceed to a desizing stage. This can be followed by one or more additional fabric processing steps. Desizing is the act of removing size from textiles. After weaving, the size coating must be removed before further processing the fabric in order to ensure a homogeneous and wash-proof result. The invention provides a method of desizing comprising enzymatic hydrolysis of the size by the action of an enzyme of the invention.

[0732] The enzymes of the invention (e.g., enzymes having cellulase, endoglucanase, cellobiohydrolase, beta-glucosidase, xylanase, mannanse, β-xylosidase and/or arabinofuranosidase activity) can be used to desize fabrics, including cotton-containing fabrics, as detergent additives, e.g., in aqueous compositions. The invention provides methods for producing a stonewashed look on indigo-dyed denim fabric and garments. For the manufacture of clothes, the fabric can be cut and sewn into clothes or garments, which is afterwards finished. In particular, for the manufacture of denim jeans, different enzymatic finishing methods have been developed. The finishing of denim garment normally is initiated with an enzymatic desizing step, during which garments are subjected to the action of amylolytic enzymes in order to provide softness to the fabric and make the cotton more accessible to the subsequent enzymatic finishing steps. The invention provides methods of finishing denim garments (e.g., a “bio-stoning process”), enzymatic desizing and providing softness to fabrics using the Enzymes of the invention. The invention provides methods for quickly softening denim garments in a desizing and/or finishing process.

[0733] The invention also provides disinfectants comprising enzymes of the invention (e.g., enzymes having cellulase, endoglucanase, cellobiohydrolase, beta-glucosidase, xylanase, mannanse, β-xylosidase and/or arabinofuranosidase activity).

[0734] The fabric or textile treatment processes of the invention can also include the use of any combination of other enzymes such as tryptophanases or tyrosine decarboxylases, laccases, catalases, laccases, other cellulases, endoglycosidases, endo-beta-1,4-laccases, amyloglucosidases, other glucosidases, glucose isomerases, glycosyltransferases, lipases, phospholipases, lipooxygenases, beta-laccases, endo-beta-1,3(4)-laccases, cutinases, peroxidases, amylases, glucoamylases, pectinases, reductases, oxidases, decarboxylases, phenoloxidases, ligninases, pullulanases, arabinanases, hemicellulases, mannanases, xylolaccases, xylanases, pectin acetyl esterases, rhamnogalacturonan acetyl esterases, proteases, peptidases, proteinases, polygalacturonases, rhamnogalacturonases, galactanases, pectin lyases, transglutaminases, pectin methylesterases, other cellobiohydrolases, and/or glucose oxidases.

[0735] Paper or Pulp Treatment

[0736] The enzymes of the invention (e.g., enzymes having cellulase, endoglucanase, cellobiohydrolase, beta-glucosidase, xylanase, mannanse, β-xylosidase and/or arabinofuranosidase activity) can be in paper or pulp treatment or paper deinking. For example, in one aspect, the invention provides a paper treatment process using enzymes of the invention. In one aspect, the enzymes of the invention can be used to modify starch in the paper thereby converting it into a liquefied form. In another aspect, paper components of recycled photocopied paper during chemical and enzymatic deinking processes. In one aspect, Enzymes of the invention can be used in combination with other enzymes, including other cellulases (including other endoglucanases, cellobiohydrolases and/or beta-glucosidases). The wood, wood waste, paper, paper product or pulp can be treated by the following three processes: 1) disintegration in the presence of an enzyme of the invention, 2) disintegration with a deinking chemical and an enzyme of the invention, and/or 3) disintegration after soaking with an enzyme of the invention. The recycled paper treated with an enzyme of the invention can have a higher brightness due to removal of toner particles as compared to the paper treated with just cellulase. While the invention is not limited by any particular mechanism, the effect of an enzyme of the invention may be due to its behavior as surface-active agents in pulp suspension.

[0737] The invention provides methods of treating paper and paper pulp using one or more polypeptides of the invention. The polypeptides of the invention can be used in any paper- or pulp-treating method, which are well known in the art, see, e.g., U.S. Pat. Nos. 6,241,849; 6,066,233; 5,582,681. For example, in one aspect, the invention provides a method for deinking and decolorizing a printed paper containing a dye, comprising pulping a printed paper to obtain a pulp slurry, and dislodging an ink from the pulp slurry in the presence of an enzyme of the invention (other enzymes can also be added). In another aspect, the invention provides a method for enhancing the freeness of pulp, e.g., pulp made from secondary fiber, by adding an enzymatic mixture comprising an enzyme of the invention (can also include other enzymes, e.g., pectinase enzymes) to the pulp and treating under conditions to cause a reaction to produce an enzymatically treated pulp. The freeness of the enzymatically treated pulp is increased from the initial freeness of the secondary fiber pulp without a loss in brightness.

[0738] The paper, wood, wood waste, or pulp treatment or recycling processes of the invention can also include the use of any combination of other enzymes such as tryptophanases or tyrosine decarboxylases, laccases, catalases, laccases, other cellulases, endoglycosidases, endo-beta-1,4-laccases, amyloglucosidases, other glucosidases, glucose isomerases, glycosyltransferases, lipases, phospholipases, lipooxygenases, beta-laccases, endo-beta-1,3(4)-laccases, cutinases, peroxidases, amylases, glucoamylases, pectinases, reductases, oxidases, decarboxylases, phenoloxidases, ligninases, pullulanases, arabinanases, hemicellulases, mannanases, xylolaccases, xylanases, pectin acetyl esterases, rhamnogalacturonan acetyl esterases, proteases, peptidases, proteinases, polygalacturonases, rhamnogalacturonases, galactanases, pectin lyases, transglutaminases, pectin methylesterases, other cellobiohydrolases, and/or glucose oxidase.

[0739] Repulping: Treatment of Lignocellulosic Materials

[0740] The invention also provides a method for the treatment of lignocellulosic fibers, wherein the fibers are treated with a polypeptide of the invention (e.g., enzymes having cellulase, endoglucanase, cellobiohydrolase, beta-glucosidase, xylanase, mannanse, β-xylosidase and/or arabinofuranosidase activity), in an amount which is efficient for improving the fiber properties. The enzymes of the invention may also be used in the production or recycling of lignocellulosic materials such as pulp, paper and cardboard, from starch reinforced waste paper and cardboard, especially where repulping or recycling occurs at pH above 7 and where the enzymes of the invention can facilitate the disintegration of the waste material through degradation of the reinforcing starch. The enzymes of the invention can be useful in a process for producing a papermaking pulp from starch-coated printed paper. The process may be performed as described in, e.g., WO 95/14807. An exemplary process comprises disintegrating the paper to produce a pulp, treating with a starch-degrading enzyme before, during or after the disintegrating, and separating ink particles from the pulp after disintegrating and enzyme treatment. See also U.S. Pat. No. 6,309,871 and other US patents cited herein. Thus, the invention includes a method for enzymatic deinking of recycled paper pulp, wherein the polypeptide is applied in an amount which is efficient for effective de-inking of the fiber surface.

[0741] Brewing and Fermenting

[0742] The invention provides methods of brewing (e.g., fermenting) beer comprising an enzyme of the invention, e.g., enzymes having cellulase, endoglucanase, cellobiohydrolase, beta-glucosidase, xylanase, mannanse, β-xylosidase and/or arabinofuranosidase activity. In one exemplary process, starch-containing raw materials are disintegrated and processed to form a malt. An enzyme of the invention is used at any point in the fermentation process. For example, enzymes of the invention can be used in the processing of barley malt. The major raw material of beer brewing is barley malt. This can be a three stage process. First, the barley grain can be steeped to increase water content, e.g., to around about 40%. Second, the grain can be germinated by incubation at 15-25° C. for 3 to 6 days when enzyme synthesis is stimulated under the control of gibberellins. During this time enzyme levels rise significantly. In one aspect, enzymes of the invention are added at this (or any other) stage of the process. The action of the enzyme results in an increase in fermentable reducing sugars. This can be expressed as the diastatic power, DP, which can rise from around 80 to 190 in 5 days at 12° C.

[0743] Enzymes of the invention can be used in any beer producing process, as described, e.g., in U.S. Pat. Nos. 5,762,991; 5,536,650; 5,405,624; 5,021,246; 4,788,066.

[0744] Increasing the Flow of Production Fluids from a Subterranean Formation

[0745] The invention also includes a method using an enzyme of the invention (e.g., enzymes having cellulase, endoglucanase, cellobiohydrolase, beta-glucosidase, xylanase, mannanse, β-xylosidase and/or arabinofuranosidase activity), wherein the method increases the flow of production fluids from a subterranean formation by removing viscous, starch-containing, damaging fluids formed during production operations; these fluids can be found within the subterranean formation which surrounds a completed well bore. Thus, this method of the invention results in production fluids being able to flow from the well bore. This method of the invention also addresses the problem of damaging fluids reducing the flow of production fluids from a formation below expected flow rates. In one aspect, the invention provides for formulating an enzyme treatment (using an enzyme of the invention) by blending together an aqueous fluid and a polypeptide of the invention; pumping the enzyme treatment to a desired location within the well bore; allowing the enzyme treatment to degrade the viscous, starch-containing, damaging fluid, whereby the fluid can be removed from the subterranean formation to the well surface; and wherein the enzyme treatment is effective to attack the alpha glucosidic linkages in the starch-containing fluid.

[0746] The subterranean formation enzyme treatment processes of the invention can also include the use of any combination of other enzymes such as tryptophanases or tyrosine decarboxylases, laccases, catalases, laccases, other cellulases, endoglycosidases, endo-beta-1,4-laccases, amyloglucosidases, other glucosidases, glucose isomerases, glycosyltransferases, lipases, phospholipases, lipooxygenases, beta-laccases, endo-beta-1,3(4)-laccases, cutinases, peroxidases, amylases, glucoamylases, pectinases, reductases, oxidases, decarboxylases, phenoloxidases, ligninases, pullulanases, arabinanases, hemicellulases, mannanases, xylolaccases, xylanases, pectin acetyl esterases, rhamnogalacturonan acetyl esterases, proteases, peptidases, proteinases, polygalacturonases, rhamnogalacturonases, galactanases, pectin lyases, transglutaminases, pectin methylesterases, other cellobiohydrolases, and/or glucose oxidase.

[0747] Pharmaceutical Compositions and Dietary Supplements

[0748] The invention also provides pharmaceutical compositions and dietary supplements (e.g., dietary aids) comprising a cellulase of the invention (e.g., enzymes having endoglucanase, cellobiohydrolase, beta-glucosidase, xylanase, mannanse, β-xylosidase and/or arabinofuranosidase activity). The cellulase activity comprises endoglucanase, cellobiohydrolase, beta-glucosidase, xylanase, mannanse, β-xylosidase and/or arabinofuranosidase activity. In one aspect, the pharmaceutical compositions and dietary supplements (e.g., dietary aids) are formulated for oral ingestion, e.g., to improve the digestibility of foods and feeds having a high cellulose or lignocellulosic component.

[0749] Periodontal treatment compounds can comprise an enzyme of the invention, e.g., as described in U.S. Pat. No. 6,776,979. Compositions and methods for the treatment or prophylaxis of acidic gut syndrome can comprise an enzyme of the invention, e.g., as described in U.S. Pat. No. 6,468,964.

[0750] In another aspect, wound dressings, implants and the like comprise antimicrobial (e.g., antibiotic-acting) enzymes, including an enzyme of the invention (including, e.g., exemplary sequences of the invention). Enzymes of the invention can also be used in alginate dressings, antimicrobial barrier dressings, burn dressings, compression bandages, diagnostic tools, gel dressings, hydro-selective dressings, hydrocellular (foam) dressings, hydrocolloid dressings, I.V dressings, incise drapes, low adherent dressings, odor absorbing dressings, paste bandages, post operative dressings, scar management, skin care, transparent film dressings and/or wound closure. Enzymes of the invention can be used in wound cleansing, wound bed preparation, to treat pressure ulcers, leg ulcers, burns, diabetic foot ulcers, scars, IV fixation, surgical wounds and minor wounds. Enzymes of the invention can be used to in sterile enzymatic debriding compositions, e.g., ointments. In various aspects, the cellulase is formulated as a tablet, gel, pill, implant, liquid, spray, powder, food, feed pellet or as an encapsulated formulation.

[0751] Biodefense Applications

[0752] In other aspects, enzymes and antibodies of this invention, including enzymes having lignocellulosic activity, including polypeptides having cellulase, endoglucanase, cellobiohydrolase, beta-glucosidase, xylanase, mannanse, β-xylosidase and/or arabinofuranosidase activity, can be used in biodefense; e.g., for the destruction of spores or microorganisms, e.g., bacteria, fungi, yeast, etc., comprising a lignocellulosic material or any biologic polymer susceptible to hydrolysis by a polypeptide of this invention. Use of enzymes and antibodies of this invention, including enzymes having lignocellulosic activity, including polypeptides having cellulase, endoglucanase, etc. activity, in biodefense applications offers a significant benefit, in that they can be very rapidly manufactured and/or developed against any currently unknown or biological warfare agents of the future. In addition, enzymes having lignocellulosic activity, including polypeptides having cellulase, etc. activity, can be used for decontamination of affected environments or materials, including clothing, or individuals. Thus, in aspect, the invention provides a biodefense or bio-detoxifying agent(s), or disinfecting agent, comprising a polypeptide having lignocellulosic activity, including polypeptides having cellulase, etc. activity, wherein the polypeptide comprises a sequence of the invention (including, e.g., exemplary sequences of the invention), or a polypeptide encoded by a nucleic acid of the invention (including, e.g., exemplary sequences of the invention), and methods of making and using them. In one aspect, the polypeptide has activity comprising endoglucanase, cellobiohydrolase, beta-glucosidase, xylanase, mannanse, β-xylosidase and/or arabinofuranosidase activity.

### REFERENCE LIST

[0753] 1. Sambrook, J. and Russell, D. W. 2001. Molecular Cloning: A Laboratory Manual. Third Edition. Cold Spring Harbor Laboratory Press, New York.

[0754] 2. Benhar, I. Biotechnological applications of phage and cell display. Biotechnology Advances 19, 1-13. 2001.

[0755] 3. Carbohydrate-Active Enzymes CAZy server on the interne; citation is Coutinho, P. M. & Henrissat, B. (1999) Carbohydrate-active enzymes: an integrated database approach. In “Recent Advances in Carbohydrate Bioengineering”, H. J. Gilbert, G. Davies, B. Henrissat and B. Svensson eds., The Royal Society of Chemistry, Cambridge, pp. 3-12.

[0756] 4. Felix, C. R. and L. G. Ljungdahl. 1993. The cellulosome: the exocellular organelle of Clostridium. Annu. Rev. Microbiol 47:791-819.:791-819.

[0757] 5. Gray (2001) Rapid evolution of reversible denaturation and elevated melting temperature in a microbial haloalkane dehalogenase. Advanced Synthesis and Catalysis 343:607-617.

[0758] 6. Guttman (1996) High-resolution capillary gel electrophoresis of reducing oligosaccharides labeled with 1-aminopyrene-3,6,8-trisulfonate. Anal. Biochem 233:234-242.

[0759] 7. Harjunpaa (1996) Cello-oligosaccharide hydrolysis by cellobiohydrolase II from Trichoderma reesei. Association and rate constants derived from an analysis of progress curves. Eur. J Biochem 240:584-591.

[0760] 8. Himmel (1999) Cellulase for commodity products from cellulosic biomass. Curr. Opin. Biotechnol 10:358-364.

[0761] 9. Kerr, R. A. 1998. GEOLOGY:The Next Oil Crisis Looms Large—and Perhaps Close. Science 281:1128.

[0762] 10. Kerr, R. A. 2000. OIL OUTLOOK:USGS Optimistic on World Oil Prospects. Science 289:237.

[0763] 11. King (1997) Expression cloning in the test tube. Science 277:973-974.

[0764] 12. Kuritz, T. 1999. An easy colorimetric assay for screening and qualitative assessment of deiodination and dehalogenation by bacterial cultures. Lett. Appl Microbiol 28:445-447.

[0765] 13. Lundberg (1993) The use of selection in recovery of transgenic targets for mutation analysis. Mutat. Res. 301:99-105.

[0766] 14. MacKenzie (1998) Crystal structure of the family 7 endoglucanase I (Cel7B) from Humicola insolens at 2.2 A resolution and identification of the catalytic nucleophile by trapping of the covalent glycosyl-enzyme intermediate. Biochem J 335:409-416.

[0767] 15. Richardson (2002) A novel, high performance enzyme for starch liquefaction. Discovery and optimization of a low pH, thermostable alpha-amylase. J Biol Chem 277:26501-26507.

[0768] 16. Sakon (1997) Structure and mechanism of endo/exocellulase E4 from Thermomonospora fusca. Nat. Struct. Biol 4:810-818.

[0769] 17. Short (1988) Lambda ZAP: a bacteriophage lambda expression vector with in vivo excision properties. Nucleic Acids Res. 16:7583-7600.

[0770] 18. Snustad (1988) Maize glutamine synthetase cDNAs: isolation by direct genetic selection in Escherichia coli. Genetics 120:1111-1123.

[0771] 19. Varrot (1999) Crystal structure of the catalytic core domain of the family 6 cellobiohydrolase II, Cel6A, from Humicola insolens, at 1.92 A resolution. Biochem J 337:297-304.

[0772] 20. Yano (1998) Directed evolution of an aspartate aminotransferase with new substrate specificities. Proc. Natl. Acad. Sci U.S.A 95:5511-5515.

[0773] 21. Zverlov (2002) A newly described cellulosomal cellobiohydrolase, CelO, from Clostridium thermocellum: investigation of the exo-mode of hydrolysis, and binding capacity to crystalline cellulose. Microbiology 148:247-255.

[0774] The following examples are offered to illustrate, but not to limit the claimed invention.

### Examples

### Example 1

### Exemplary Screening Protocol Using GIGAMATRIX™ Screening

[0775] The invention provides methods for screening for enzymes having lignocellulosic activity. These described methods can also be used to determine if an enzyme has the requisite activity and is with the scope of the claimed invention. In one aspect, the methods of the invention use Verenium Corporation's proprietary GIGAMATRIX™ platform; see, e.g., PCT Patent Publication No. WO 01/38583; U.S. patent application no. 20050046833; 20020080350; U.S. Pat. No. 6,918,738; Design U.S. Patent No. D480,814. For example, in one aspect, GIGAMATRIX™ is used in methods to determine if a polypeptide has a lignocellulosic activity and is within the scope of the invention, or, to identify and isolate a polypeptide having lignocellulosic activity, e.g., a polypeptide having a glycosyl hydrolase, cellulase, endoglucanase, cellobiohydrolase and/or β-glucosidase (beta-glucosidase) activity.

[0776] A GIGAMATRIX™ platform can include an ultra-high throughput screen based on a 100,000 well microplate with the dimensions of a conventional 96 well plate. While in this example, the GIGAMATRIX™ screen implemented use of two (2) substrates—Methyl-umbelliferyl cellobioside (MUC) and methylumbelliferyl lactoside (MUL), any substrate specific for or determinative of any lignocellulosic activity can be used, including substrates for cellulase, endoglucanase, cellobiohydrolase and/or β-glucosidase.

[0777] Phagemid versions of different clones can be screened because the substrate diffuses into cells and fluorescence was thought to be more easily detectable. A host strain lacking, beta-galactosidase can be used in order to decrease activity on the lactoside substrate. The lactoside substrate can result in fewer hits and can be deemed more specific than the cellobiose substrate. In addition, the lactoside substrate can result in fewer beta-glucosidase hits. A secondary screening can consist of plating the clones on agar plates and then colony picking into 384 well plates containing media and MUL. Active clones against MUL are differentiated from a background of inactive clones. Individual clones can then be grown overnight and fluorescence measured. The most active hits can then be picked for sequencing.

### Characterization Enzyme and Substrate Activity

[0778] The hits discovered in the GIGAMATRIX™ screen can first be screened against cellohexaose to determine action pattern on a cellulose oligomer. Clones can be grown overnight in TB media containing antibiotic, cells can then be lysed and lysates clarified by centrifugation. Subclones can be grown to an OD600=0.5 induced with an appropriate inducer and then grown an additional 3 h before lysing the cells and clarifying the lysate. Genomic clones will generally have less activity than a subclone, but are a more facile way of assessing activity in a large range of clones. Initial studies can be performed using thin layer chromatography (TLC) for endpoint reactions usually run for 24 h. Enzymes can also be tested on phosphoric acid swollen cellulose (PASC), which is crystalline cellulose that is made more amorphous through swelling by acid treatment.

[0779] Cellulases which are active against PASC, can also release cellobiose as well as cellotriose and/or glucose. The clones from the GIGAMATRIX™ discovery effort can is be also tested against PASC and on cellulosic substrates such as cellohexaose (e.g., Seikagaku, Japan). Thin layer chromatography (TLC) experiments can be use to show that clones are able to hydrolyze the cellohexaose. Of these clones, some are able to generate glucose as the final product. Several enzymes can produce cellobiose and/or larger fragments, but when the exact nature of the product pattern can not be discerned from the TLC experiments, a capillary electrophoresis (CE) method can also be used.

### Example 2

### Sequence Based Discovery

[0780] The invention provides methods for identifying and isolating biomass—(e.g., bagasse, corn fiber)—degrading enzymes, including polypeptides having a lignocellulolytic activity, e.g., a glycosyl hydrolase, a cellulase, an endoglucanase, a cellobiohydrolase, a beta-glucosidase, a xylanase, a mannanse, a xylosidase (e.g., a β-xylosidase) and/or an arabinofuranosidase activity, using nucleic acid sequences of the invention, e.g., as hybridization probes and/or as amplification (e.g., PCR) primers.

[0781] The invention provides amplification primer pairs for amplifying (e.g., by PCR) nucleic acids (including transcripts or genes) encoding a polypeptide having a lignocellulosic activity, e.g., a glycosyl hydrolase, cellulase, endoglucanase, glucosidase (beta-glucosidase), xylanase, xylosidase (e.g., β-xylosidase) and/or arabinofuranosidase activity, or can hydrolyze (degrade) soluble cellooligsaccharides and arabinoxylan oligomers into monomer xylose, arabinose and glucose, wherein the primer pair is capable of amplifying a nucleic acid comprising a sequence of the invention, or fragments or subsequences thereof. One or each member of the amplification primer sequence pair can comprise an oligonucleotide comprising at least about 10 to 50, or more, consecutive bases of the sequence, or about 10, 11, 12, 13, 14, 15, 16, 17, 18, 19, 20, 21, 22, 23, 24, 25, 26, 27, 28, 29, 30, 31, 32, 33, 34, 35, 36 or more consecutive bases of the sequence. The invention provides amplification primer pairs, wherein the primer pair comprises a first member having a sequence as set forth by about the first (the 5′) 12, 13, 14, 15, 16, 17, 18, 19, 20, 21, 22, 23, 24, 25, 26, 27, 28, 29, 30, 31, 32, 33, 34, 35, 36 or more residues of a nucleic acid of the invention, and a second member having a sequence as set forth by about the first (the 5′) 12, 13, 14, 15, 16, 17, 18, 19, 20, 21, 22, 23, 24, 25, 26, 27, 28, 29, 30, 31, 32, 33, 34, 35, 36 or more residues of the complementary strand of the first member.

### Example 3

### Genetic Engineering of and Screening for Lignocellulosic Enzymes

[0782] This example describes an exemplary protocol for the genetic engineering of an enzyme of the invention. The engineered, or “optimized”, enzyme of the invention can be used in the conversion of biomass (e.g., bagasse, corn fiber) to monosaccharides, fuels and/or chemicals or other useful products; e.g., for making effective and sustainable alternatives to petroleum-based products. The engineered, or “optimized”, enzyme of the invention can be expressed in organisms (e.g., microorganisms, such as bacteria) for its participation in chemical cycles involving natural biomass conversion. In one aspect, this engineered, or “optimized”, enzyme of the invention is used in “enzyme ensembles” for the efficient depolymerization of cellulosic and hemicellulosic polymers to metabolizable carbon moieties. As discussed above, the invention provides methods for discovering and implementing the most effective of enzymes to enable these important new “biomass conversion” and alternative energy industrial processes.

[0783] Using metagenomic discovery and a non-stochastic method of directed evolution (called “DIRECTEVOLUTION®, as described, e.g., in U.S. Pat. No. 6,939,689, which includes GENE SITE SATURATION MUTAGENESIS (or GSSM) (as discussed above, see also U.S. Pat. Nos. 6,171,820 and 6,579,258) and Tunable GeneReassembly (TGR) (see, e.g., U.S. Pat. No. 6,537,776) technologies. These technologies can be used for the discovery and optimization of an enzyme component for lignocellulosic biomass material (e.g., cellulose) reduction (e.g., hydrolysis) to monosaccharides (e.g., glucose), cellobiohydrolase and other carbohydrates.

[0784] In one embodiment, an enzyme discovery screen can be implemented using Verenium Corporation's GIGAMATRIX™ high throughput expression screening platform (discussed above) to identify enzymes; for example, to identify cellobiohydrolases using methylumbelliferyl cellobioside as a substrate. Hits can be characterized for activity against AVICEL® Microcrystalline Cellulose (MCC) (FMC Corporation, Philadelphia, Pa.).

[0785] In one aspect, an enzyme can be chosen as a candidate for optimization using GENE SITE SATURATION MUTAGENESIS (or GSSM) technology. In one embodiment, before performing GSSM evolution, the signal sequence, if present, can be removed and a starting methionine added. As discussed above, GSSM technology can rapidly mutate all amino acids in the protein to the 19 other amino acids in a sequential fashion. Mutants can be screened using a fiber-based assay and potential upmutants representing single amino acid changes can be identified. These upmutants can be combined into a new library representing combinations of the upmutants. This library can be screened resulting in identification of several candidate enzymes for commercialization.

[0786] Blending of Upmutants

[0787] Using gene reassembly (Tunable GeneReassembly (TGR)) technology, GSSM upmutants (enzyme-encoding sequence variants) can be “blended” (mixed together to achieve an optimal result) in order to construct an enzyme with a desired activity or trait; and then screening (e.g., GSSM) can be used to identify candidate(s) with the best desired activity or trait (e.g., thermotolerance). Activity assays can be the same as for the GSSM screening except reactions can be further diluted to account for increased activity of upmutants over the wildtype enzyme.

### Example 4

### Enzyme Mixtures, or “Cocktails” for Processing/Converting Biomass

[0788] The invention provides novel combinations, or mixtures, or “cocktails”, of enzymes for processing lignocellulosic-comprising biomass, e.g., bagasse or corn fiber, to useable products, for example, to lignin, or monosaccharides such as glucose, which can then be processed into ethanol. This example describes enzyme mixtures, or “cocktails”, of the invention to digest biomass, e.g. bagasse, into fermentable sugars, and their development. In one aspect, the enzyme mixtures, or “cocktails” comprise at least one exemplary enzyme of the invention. A mixture (“ensemble” or “cocktail”) of the invention can also comprise any other enzyme, e.g., a glucose oxidase, a phosphorylase, and amidase, etc., and the like.

[0789] In one embodiment, the enzyme mixtures, or “cocktails”, of the invention are used to hydrolyze lignocellulosic material, e.g., cellulose or any β1,4-linked glucose moieties and/or hemicellulose or any branched polymer comprising a β-1,4-linked xylose backbone with branches of arabinose, galactose, mannose, glucuronic acid, and/or linkages to lignin, e.g., via ferulic acid ester groups. Thus, in various aspects, the methods and compositions of the invention address the complexity and problems of digestion of hemicellulose to monomer sugars due to the variability of sugars and linkages.

### Exemplary Combinatorial Enzyme Screening Protocol

[0790] 1. Prepare Enzyme Panel Plates
   [0791] 1.1. Resuspend lyophilized protein powder in 50% glycerol to a concentration of 25 mg protein/mL
   [0792] 1.2. Array 200 μL of each enzyme on a 96-well plate
   [0793] 1.3. Store at −20° C.
[0794] 2. Prepare Enzyme Cocktail Plates
   [0795] 2.1. Prepare 11.11× solution of constant enzymes in diH₂O (0.1 mg/mL total enzyme concentration)
   [0796] 2.2. Dispense 27 μL into wells of two 96-well plates (High Dose and Low Dose)
   [0797] 2.3. Transfer 3 μL from Enzyme Panel plate to the High Dose plate. Mix well
   [0798] 2.4. Transfer 3 μL from High Dose plate to the Low Dose plate. Mix well
[0799] 3. Prepare Solution of Buffered Substrate
   [0800] 3.1. Want pH controlled buffer, sodium azide, and xylanase at 1.11× concentration (55.56 mM, 5.56 mM, and 0.32 mg/mL, respectively)
   [0801] 3.2. Want substrate at 1× concentration of 0.1% cellulose (approximately 2% pretreated ground bagasse, depending on cellulose content of substrate batch)
[0802] 4. Prepare Stop Plates
   [0803] 4.1. Make a solution of 150 mM sodium carbonate buffer, pH10
   [0804] 4.2. Dispense 60 pl. per well into a 384-well plate
[0805] 5. Prepare Digest Plates
   [0806] 5.1. Dispense 180 μL of buffered substrate per well into two 96-well plates (High and Low Dose plates)
   [0807] 5.2. Transfer 20 μL from High Dose cocktail plate to High Dose digest plate, pipette to mix
      [0808] 5.2.1. Allow substrate to settle briefly and transfer 20 μL from Digest Plate to the Stop Plate for T=0 timepoint
   [0809] 5.3. Repeat steps 5.2 for Low Dose cocktail plate
   [0810] 5.4. Seal Digest Plates and incubate at 37° C. for 4 hours
   [0811] 5.5. Spin Digest Plates at 3000 rpm for 1 minute to bring supernatant to the plate bottom
   [0812] 5.6. Transfer 20 μL from Digest Plate to Stop Plate for T=4 hr timepoint
   [0813] 5.7. Add glucose and cellobiose standards to Stop Plate
[0814] 6. β-glucosidase digest
   [0815] 6.1. Prepare a solution of β-glucosidase (approximately 35 mg/mL) in 125 mM sodium phosphate buffer, pH 7.0 and dispense 35 μL per well into a 384-well plate
   [0816] 6.2. Using the APRICOT™ system (Process Analysis and Automation Ltd, Hampshire, UK), transfer 4 μL from the Stop Plate to the β-glucosidase plate; Incubate at room temperature for 3 hrs
[0817] 7. Glucose Oxidase (GO) Assay
   [0818] 7.1. Prepare 2× GO assay solution
      [0819] 7.1.1. 100 mM pH7.4 sodium phosphate buffer, 2 U/mL glucose oxidase, 0.2 U/mL Horseradish peroxidase, 0.1 mM Amplex Red. Mix well
   [0820] 7.2. Immediately add 40 μL per well to the β-glucosidase plate; Incubate at room temperature for 25-30 minutes
   [0821] 7.3. Read 530 nm/595 nm excitation/emission on spectrophotometer.

[0822] Assays for the individual screening of enzyme activity, including an exemplary large scale enzyme digestibility assay, are described below in Example 5.

[0823] The following Table 4 summarizes several exemplary enzyme “cocktails” or mixtures of the invention, and their characterization:

TABLE 4

| | | | % conversion after 4 hours | | | | |
|---|---|---|---|---|---|---|---|
| | | | 96-well plate | small scale | large scale | | |
| enzyme 1 | enzyme 2 | enzyme 3 | (normalized¹) | rxns | rxns | optimal ratio | Comments |
| *SEQ ID NO: 34 | *SEQ ID NO: 360 | #SEQ ID NO: 214 | 22.0% | 20.55% | 11.2% | 33:33:33 | |
| SEQ ID NO: 360 | #SEQ ID NO: 90 | *SEQ ID NO: 358 | 23.2% | 32.21% | 6.5% | 25:25:50 | |
| *SEQ ID NO: 360 | #SEQ ID NO: 90 | #SEQ ID NO: 428 | 19.9% | | 0.8% | 60:10:30 | |
| *SEQ ID NO: 360 | #SEQ ID NO: 90 | *SEQ ID NO: 401 | 19.7% | 34.53% | 6.9% | 42:40:18 | |
| *SEQ ID NO: 360 | #SEQ ID NO: 426 | #SEQ ID NO: 366 | 16.0% | 20.10% | 9.9% | 25:25:50 | |
| *SEQ ID NO: 360 | #SEQ ID NO: 426 | #SEQ ID NO: 134 | 15.8% | 17.53% | | 37:14:49 | |
| *SEQ ID NO: 360 | #SEQ ID NO: 426 | #SEQ ID NO: 214 | 19.0% | 21.26% | 3.6% | 53:11:36 | |
| *SEQ ID NO: 360 | #SEQ ID NO: 426 | #SEQ ID NO: 2 | 18.1% | 18.07% | | 50:25:25 | |
| *SEQ ID NO: 360 | *SEQ ID NO: 34 | #SEQ ID NO: 366 | 18.6% | 18.13% | | 42:40:18 | |
| *SEQ ID NO: 360 | #SEQ ID NO: 2 | *SEQ ID NO: 377 | 17.1% | | | | |
| *SEQ ID NO: 360 | #SEQ ID NO: 2 | *SEQ ID NO: 358 | 16.1% | | | | |
| #SEQ ID NO: 426 | #SEQ ID NO: 176 | #SEQ ID NO: 428 | 8.2% | 21.14% | 1.9% | 33:33:33 | all bacterial |
| #SEQ ID NO: 426 | #SEQ ID NO: 176 | #SEQ ID NO: 430 | 8.2% | 14.52% | | 25:50:25 | all bacterial |
| *SEQ ID NO: 34 | *SEQ ID NO: 371 | #SEQ ID NO: 168 | 19.1% | 23.31% | 8.5% | 60:10:30 | |
| *SEQ ID NO: 34 | *SEQ ID NO: 360 | #SEQ ID NO: 168 | 17.9% | | 10.3% | | |
| *SEQ ID NO: 34 | *SEQ ID NO: 282 | #SEQ ID NO: 90 | 18.6% | | 7.4% | | |
| *SEQ ID NO: 360 | *SEQ ID NO: 282 | #SEQ ID NO: 168 | 18.0% | | 10.6% | | |
| *SEQ ID NO: 360 | *SEQ ID NO: 36 | #SEQ ID NO: 90 | 17.8% | | | | |
| *SEQ ID NO: 34 | *SEQ ID NO: 282 | #SEQ ID NO: 168 | 17.3% | | 10.1% | | |
| *SEQ ID NO: 360 | *SEQ ID NO: 282 | #SEQ ID NO: 74 | 17.0% | | | | |
| *SEQ ID NO: 360 | *SEQ ID NO: 282 | #SEQ ID NO: 90 | 16.8% | | | | |
| *SEQ ID NO: 360 | *SEQ ID NO: 36 | #SEQ ID NO: 168 | 16.8% | | | | |
| **SEQ ID NO: 182 | *SEQ ID NO: 36 | ##SEQ ID NO: 40 | 23.3% | | | | |
| **SEQ ID NO: 182 | *SEQ ID NO: 36 | ##SEQ ID NO: 38 | 23.7% | | | | |
| **SEQ ID NO: 140 | *SEQ ID NO: 36 | ##SEQ ID NO: 38 | 23.6% | | | | |
| *SEQ ID NO: 34 | *SEQ ID NO: 358 | #SEQ ID NO: 168 | 19.6% | 24.98% | 14.5% | 67:7:26 | DVSA #1 |

¹Percent conversion normalized to the average DVSA#1 conversion value
Enzymes Expressed in:
*Apergillus niger
#E. coli
**Streptomyces diversa
##Pichia pastoris

[0824] Additional enzyme “mixtures” or “cocktails” of the invention comprise the following several combinations of the exemplary enzymes SEQ ID NO:34; SEQ ID NO:360; SEQ ID NO:358; and SEQ ID NO:371. The following chart summarizes the results of the various exemplary mixtures' enzymatic activity under conditions comprising a 37° C. digestion on a 0.1% AVICEL® substrate, where the total enzyme dose was held constant at 20 mg/g cellulose:

| | 0 | 1.25 | 2.5 | 4 |
|---|---|---|---|---|
| BD | 0% | 4% | 5% | 6% |
| CD | 0% | 4% | 5% | 6% |
| DF | 0% | 4% | 5% | 6% |
| BB | 0% | 1% | 2% | 2% |
| CC | 0% | 1% | 2% | 2% |
| DD | 0% | 1% | 2% | 2% |
| FF | 0% | 2% | 2% | 3% |
| neg | 0% | 0% | 0% | 0% |

enzyme ID
B SEQ ID NO: 34
C SEQ ID NO: 360
D SEQ ID NO: 358
F SEQ ID NO: 371

[0825] Data summarizing the results of the various exemplary mixtures' enzymatic activity under conditions comprising 37° C. digest on 0.1% AVICEL® substrate is illustrated in FIG. 7.

[0826] Additional enzyme “mixtures” or “cocktails” of the invention comprise the following several combinations of the exemplary enzymes SEQ ID NO:358; SEQ ID NO:360; SEQ ID NO:168; the following charts summarize the results of the various exemplary mixtures' enzymatic activity under conditions comprising a 37° C. digestion on a 0.1% AVICEL® substrate, where the total enzyme dose was held constant at 20 mg/g cellulose:

with 22419

| | conversion | stdev | conversion | stdev |
|---|---|---|---|---|
| AB | 0.4% | 0.1% | 2.7% | 0.5% |
| C + vector ctrl | | | 0.8% | 0.1% |
| AA | 0.3% | 0.0% | 1.4% | 0.0% |
| BB | 0.2% | 0.1% | 2.4% | 0.1% |

(See above)

| | | |
|---|---|---|
| A | 0.3% | 0.0% |
| B | 0.2% | 0.1% |
| C | 0.8% | 0.1% |
| A + B | 0.4% | 0.1% |
| B + C | 2.4% | 0.1% |
| A + C | 1.4% | 0.0% |
| A + B + C | 2.7% | 0.5% |

enzyme ID
A SEQ ID NO: 358 (encoded, e.g., by SEQ ID NO: 357)
B SEQ ID NO: 360 (encoded, e.g., by SEQ ID NO: 359)
C SEQ ID NO: 168 (encoded, e.g., by SEQ ID NO: 367)

[0827] Data summarizing the results of the various exemplary mixtures' enzymatic activity under conditions comprising 37° C. digest on 0.23% bagasse is illustrated in FIG. 8.

[0828] Enzyme B and Enzyme C together have a synergistic effect: individually, Enzyme B gives 0.2% conversion and Enzyme C gives 0.8% conversion, so it would be expected that using them together would give 1% conversion, however, instead the Enzyme B and C combination gives a 2.4% conversion—clearly a synergistic effect. Other compositions of the invention comprising mixtures, or “cocktails” of the invention also can give a synergistic effect with regard to hydrolysis of a biomass, e.g., bagasse conversion, as described in this Example.

### Example 5

### Characterization of the Activity of Enzymes of the Invention

[0829] This example describes alternative exemplary screening protocols for the characterization and identification of enzymes of the invention. For example, this example describes how exemplary enzymes of the invention can be identified and used as lignocellulolytic enzymes for the hydrolysis of a biomass, e.g., plant biomass, such as bagasse or corn fiber (e.g., corn seed fiber). In one aspect, exemplary enzymes of the invention are used alone or in combination as glycosyl hydrolases, endoglucanases, cellobiohydrolases and/or β-glucosidases for, e.g., the treatment, e.g. saccharification, of cellulose or cellulose-comprising compositions, such as plant biomass, e.g., sugarcane bagasse, corn fiber or other plant waste material (such as a hay or straw, e.g., a rice straw or a wheat straw, or any the dry stalk of any cereal plant) or processing or agricultural byproduct.

[0830] Glucose Oxidase Assay for Quantifying Glucose

[0831] This exemplary protocol describes a glucose oxidase assay for quantifying glucose: a fluorescent enzyme-coupled assay to indirectly measure glucose concentration in complex mixtures (e.g. feedstocks, fiber samples, bagasse, corn fiber or other plant waste material or processing or agricultural byproduct, etc.). Glucose produced during enzymatic hydrolysis of carbohydrates is oxidized with glucose oxidase: this oxidation is coupled to a peroxidase and a fluorescent dye, and the resulting fluorescence is quantified by comparing against a glucose standard curve. A schematic of the assay, as illustrated in FIG. 6, shows that FAD is bound to the glucose oxidase, and is not an added component.

[0832] The following materials are needed for this exemplary assay:
[0833] Powdered Glucose Oxidase (e.g., A. niger Sigma Cat#G 7141);
[0834] Horseradish Peroxidase (liquid: e.g., Sigma Cat#P 6140);
[0835] AMPLEX RED™ (10-Acetyl 3,7 Dihydroxyphenoxazine; e.g., Molecular Probes Cat#A 12222);
[0836] Glucose;
[0837] Sodium Phosphate Buffer, pH 7.5, 50 mM;
[0838] Dimethyl Sulfoxide (DMSO);
[0839] Black microtiter plates;
[0840] Fluorescent plate reader (e.g., Tecan, SpectraMax, etc.).

[0841] The following stock solutions in the pH 7.5 sodium phosphate buffer are needed, unless otherwise specified. All of these stock solutions are stable for several weeks when stored at the recommended temperatures.
[0842] Glucose Oxidase: make a 100 U/ml solution, to be kept at 4° C.;
[0843] Horse Radish (HR) Peroxidase: make a 40 U/ml solution, to be kept at 4° C.;
[0844] AMPLEX RED™ (10-acetyl-3,7-dihydroxyphenoxazine): dissolve 5 mg into 3.880 ml of DMSO to make a 5 mM solution (molecular weight (MW) of AMPLEX RED™ is 257.25). Keep this solution in a dark vial at −20° C.;
[0845] Glucose: to prevent microbial growth and consumption of your glucose stock solution, prepare in 10 mM Na-Azide and store frozen.

[0846] The working stock of reagent should be made just prior to analysis. Assuming each reaction uses 45 μl of reagent, calculate the volume of reagent you will make from the number of samples you have, e.g. 100 samples is 4.5 ml working stock reagent. Make slightly more reagent than you will need, to avoid sucking air on the last row of samples. The AAO working stock reagent is your sodium phosphate buffer containing 1% (v/v) of each of stock enzyme solutions (1% of 100 U/ml Glucose Oxidase and 1% of 20 U/ml HR Peroxidase) and 1% of fluorescent reagent (5 mM 10-acetyl-3,7-dihydroxyphenoxazine, or AMPLEX RED™).

[0847] Pipette 5 ul from your enzymatic reaction plate into a black microtiter plate (e.g., either a 96- or 384- well plate), and add 45 ul of working stock reagent. Be sure to include a standard curve of glucose in a plate so that you can compare plates incubated for slightly different times. Incubate in the dark for approximately 15-20 minutes and take an endpoint reading on a fluorescent plate reader. Recommended excitation and emission spectra for resorufin (the product of Amplex Red) are 545 nm ex/590 nm em. Be careful not to let your assay pH fall below 6.5, as fluorescence will decrease around the pKa of resorufin (approximate 6.0).

[0848] Exemplary Characterization Assay: PASC Assay for CBH Activity Screening

[0849] This exemplary assay can be used to determine if an enzyme has cellobiohydrolase activity and is within the scope of the claimed invention. In one embodiment, the objective of the assay is to determine if cellobiohydrolase subclones are active using PASC (Phosphoric Acid Swollen Cellulose) as substrate.

[0850] Exemplary Assay Conditions:
[0851] 100 ul reaction volume;
[0852] 50 mM pH5 buffer (sodium acetate) or 50 mM pH7 buffer (sodium phosphate);
[0853] 0.75% PASC (neutral pH);
[0854] 20 ul enzyme prep soluble fraction (1:5 dilution in reaction);
[0855] (+) control and (−) control included;
[0856] Reaction in 96 well PCR plate with foil seal;
[0857] Overnight reaction at 37° C. using thermocycler (or heat block).

[0858] Exemplary Analysis:
[0859] Glucose Oxidase analysis (fluorescence measured at 545/590 using SPECTRAMAX™ reader)

[0860] Materials:
[0861] 96 well PCR plate (used for the reaction);
[0862] Black 384 well plate with black bottom (used for glucose oxidase detection);
[0863] Foil seal;
[0864] 1.5% PASC stock solution;
[0865] CBH subclones samples (lysed and spun down);
[0866] MEGAZYME™ (Wicklow, Ireland) CBHI sample (positive control);
[0867] Vector with no insert sample (negative control);
[0868] 500 mM pH5 sodium acetate stock solution;
[0869] 500 mM pH7 sodium phosphate stock solution;
[0870] Thermocycler or heat block (at 37° C. for reaction);
[0871] SPECTRAMAX™ fluorescence reader (Molecular Devices Corporation, Sunnyvale, Calif.) for glucose oxidase detection.
[0872] Glucose Oxidase kit:
   [0873] 1) 800 mM pH7.4 phosphate buffer stock
   [0874] 2) Purified β-glucosidase (for example, the exemplary SEQ ID NO:424 enzyme of the invention, encoded, e.g., by SEQ ID NO:423)
   [0875] 3) 2500/250 U/ml Glucose Oxidase/Horse Radish (HR) Peroxidase cocktail
   [0876] 4) 50 mM Amplex red stock (light sensitive)

[0877] Exemplary Protocol for PASC Reaction:
[0878] 1) Add 20 ul (−) control (vector no insert) to well A1 and C1 in 96 well PCR plate. A1 will be the negative control for reactions at pH5. C1 will be the negative control for reactions at pH7.
[0879] 2) Dilute 1:20 CBHI stock (Megazyme) (20 ul stock+380 ul water)
[0880] 3) Add 20 ul diluted CBHI to wells A2 and C2. A2 will be the (+) control for reactions at pH5. C2 will be the (+) control for reactions at pH7.
[0881] 4) Add 20 ul CBH subclone samples to rows A and C (if more than 10 samples, continue adding to row B and D). RowA will be reactions at pH 5. Row C will be reactions at pH7.
[0882] 5) Add 20 ul autoclaved water to wells in row A and C containing samples.
[0883] 6) Add 10 ul 500 mM pH5 buffer stock to row A (50 mM in reaction)
[0884] 7) Add 10 ul 500 mM pH7 buffer stock to Row C (50 mM in reaction)
[0885] 8) Using scissors, clip the tips of 200 ul Rainin pipet tips. Pipet tips must be modified to draw up PASC stock solution.
[0886] 9) Add 50 ul 1.5% PASC stock to all wells containing samples. Mix well using pipet.
[0887] 10) Seal PCR plate well with foil seal and place plate in thermocycler (or heat block).
[0888] 11) Let PCR plate incubate at 37° C. overnight.

[0889] Exemplary Protocol for Glucose Oxidase Analysis:
[0890] 1) Remove PCR plate from 37° C. incubator and spin down plate for 5 minutes at 4,000 RPM (using Eppendorf centrifuge).
[0891] 2) Using a multi-channel pipet, transfer 25 ul reaction supernatant to a black 384 well detection plate. Make sure not to transfer any of the pellet to detection plate (supernatant only).
[0892] 3) Make 2× glucose oxidase cocktail (volume depends on number of samples):

| Component | [Stock] | | 2x Cocktail | |
|---|---|---|---|---|
| Sterile dI water | n/a | | qs | |
| Sodium phosphate pH7.4 | 800 | mM | 100 | mM |
| B-Glc (SEQ ID NO: 424) | variable | | 0.01 | U/ml |
| GO/HRP mix | 2500/250 | U/ml | 10/1 | U/ml |
| Amplex red | 50 | mM | 0.1 | mM |

[0893] Glucose Oxidase (GO) is from Sigma (#G7141-50KU). Dissolve all 50,000 units in 5 ml 50 mM phosphate pH7.4 buffer.
[0894] Horse Radish Peroxidase (HRP) is from Sigma (#P2088-5KU). Dissolve all 5,000 units in 5 ml 50 mM phosphate pH7.4 buffer.
[0895] GO and HRP are then combined in equal volumes (2,500/250 GO/HRP).
[0896] Amplex Red is from Molecular Probe (#A22177). Dissolve 10mg vial in 0.777 ml DMSO to obtain 50 mM stock. Store at −20C protected from light.
[0897] 4) Add 25 ul of 2× glucose oxidase cocktail to wells in 384 well detection plate containing reaction supernatant. Mix well and avoid formation of bubbles.
[0898] 5) Let detection plate incubate at room temperature for 30 minutes. Protect plate from light during incubation.
[0899] 6) Read plate on a SPECTRAMAX™ fluorescence plate reader at 545/590 nm.
[0900] 7) Save data as a text file and store data. Open up data in EXCEL™ sheet and analyze results.
[0901] 8) Data analysis:
   [0902] CBH subclones deemed “active” must have much higher 545/590 values than those of the negative control. For example, a sample with a value of 1200 would not be considered active if the negative control is 1000. Conversely, a sample with a value of 2500 would be considered active if the negative control is 1000.
   [0903] Samples performing with similar or higher values than the positive control to are deemed “highly active.”
   [0904] All active CBH subclones will be further characterized on more relevant substrates (AVICEL® Microcrystalline Cellulose (MCC) (FMC Corporation, Philadelphia, Pa.), or a biomass target, e.g., a bagasse, corn fiber, etc.).
   [0905] Interpretation of glucose oxidase data is relatively subjective, thus it is very important to have a reliable positive and negative control each time an experiment is performed.

[0906] Exemplary CBH Characterization Assay

[0907] This exemplary assay can be used to determine if an enzyme has cellulase or cellobiohydrolase (CBH) activity and is within the scope of the claimed invention. This exemplary activity-based screen is for identifying and screening for cellobiohydrolases and other cellulases. Lambda libraries are screened in 384-well plates for activity on microcrystalline cellulose (AVICEL®) and cellulase activity is detected in an enzyme-coupled reaction that includes a β-glucosidase and Invitrogen's glucose oxidase glucose detection assay.

[0908] Primary Screen

[0909] Preparation
[0910] 1. Prepare and titer a sufficient amount of E. coli host in MgSO₄ at OD1.
[0911] 2. Titer the amplified lambda library.
[0912] 3. Label plates with bar-codes for the robot.

[0913] 4. Schedule the robot run.
[0914] 5. Make sure there are sufficient amounts of plates, top agar, reagents, autoclaved reagent bottles, etc.

[0915] Calculations
[0916] 1. How much screening culture will you need?
   [0917] Example: if 145 plates will be screened at 25 μL per well, with a safety cushion of 10 extra plates-worth, you will need about 1.5 liters of screening culture.
[0918] 2. How much E. coli host prep will you need? The culture should be at an initial OD₆₀₀ of about 0.03.
   [0919] Example: for 1.5 liters of culture, you will need 45 mL of OD 1 host prep.
[0920] 3. How much library will you need?
   [0921] Example: for an initial seed density of 2 clones per well, you will need a starting concentration of 0.08 phage per μL (i.e., 2 phage in 25 μL). For 1.5 liters of culture, you will need 1.2×10⁵ phage clones. If the titer of the library is 1.5×10⁶ per μL for example, you will need to add 8 μL of a 1/100 dilution for this screen. Use SM buffer for making dilutions of lambda libraries.
[0922] 4. How much NZY and AVICEL® will you need? The AVICEL® concentration in the screening culture should be around 5% in 1× NZY medium.
   [0923] Example: for 1.5 liters of culture, you will need 577 mL of 13% dispersed AVICEL® stock. You will also need 750 mL of 2× NZY to result in a final concentration of 1× NZY. You will also need to qs the culture to 1.5 liters with sterile water (128 mL in the case of this example).

[0924] Day 1
[0925] 1. Combine the calculated amounts of E. coli host and lambda library in a suitable sterile container. Mix gently and allow phage adsorption to occur at room temperature for 15 minutes.
[0926] 2. Meanwhile, combine the calculated volumes of 2× NZY medium, 13% dispersed AVICEL® stock and sterile water in a suitable sterile container. The AVICEL® will flocculate in the presence of NZY, giving it a “curdled milk” appearance. Mix the suspension on high with a stir bar as thoroughly as possible to avoid large clumps.
[0927] 3. Combine the cell/phage suspension with the NZY/AVICEL® screening medium and gently mix. This is the screening culture.
[0928] 4. Concurrent Titer: in a sterile 2059 tube, combine 250 μL of OD1 E. coli prep with 500 μL of screening culture, add 7 mL of molten top agar, plate on a 150 mm NZY plate, and incubate O/N at 37° C. For a seed density of 2 per well, this should result in about 40 plaques.
   [0929] a. Next Day: Count plaques on plate and update report on clones screened using: (2×(# plaques))*(9.6 ml×(# of plates screened))
[0930] 5. Using a sterile TITERTEK™ (Huntsville, Ala.) head, load the remainder of the screening culture into bar-coded 384-well plates at 25 μL per well. Perform this in a laminar flow hood if possible.
[0931] 6. Control Plates: prepare at least two 384-well plates with assay controls per library screened.
   [0932] a. Prepare culture medium with at the following final concentrations: 5% dispersed AVICEL®; 1× NZY; E. coli host at OD₆₀₀ 0.03
   [0933] b. To one batch, add positive control phage “D7” to culture medium at a concentration of around 0.2-0.4 phage per μL; to another batch, add negative control phage “N38” (OGL7) at the same concentration
   [0934] c. Dispense into black 384-well plates at 25 μL per well, positive control in columns 1-12, negative control in columns 13-24.
[0935] 7. Incubate 384-well plates at 37° C. overnight in a humidified incubator. Take any necessary precautions to minimize evaporation/condensation problems from well-to-well and from plate-to-plate.

[0936] Day 2
[0937] 1. Prepare a robotic script for the number of plates being screened:
   [0938] a. 30 minute room temperature incubation between cocktail addition and plate read.
   [0939] b. Use 560/610 filter set for the first read of each plate.
   [0940] c. Use UV/blue filter set for the second (reference) read of each plate.
[0941] 2. Prepare 2× assay cocktail (cap tightly and shield from light); you will generally need about the same volume as the amount needed for screening culture on Day 1. Wait to add DMSO to Amplex Red, and Amplex Red to cocktail mixture until placing on the robot. This will decrease oxidation of Amplex Red. Add the following components in order:

| | | | | | Example | |
|---|---|---|---|---|---|---|
| Component | 2x Cocktail | | [Stock] | | (1.5 L) | |
| Sterile dI water | n/a | | n/a | | qs | |
| Na Phosphate Buffer, | 100 | mM | 800 | mM | 188 | mL |
| pH 7.4 | | | | | | |
| SEQ ID NO: 424 | 0.01 | U/mL | Variable | | Calc | |
| GO/HRP mix | 10/1 | U/mL | 2500/250 | U/mL | 6 | mL |
| Amplex Red | 0.1 | mM | 50 | mM | 3 | mL |

[0942] 3. Bring incubated plates, assay cocktail and sterile TITERTEK™ head to Robot in Engineering.
[0943] 4. Stack plates with barcode facing out on carousel in incubator 1 starting with column one and filling down the column. Note: place control plates in the first positions and after the final plate of each library.
[0944] 5. Attach TITERTEK™ head to TITERTEK™ 1
[0945] 6. Place assay bottle in tilted position using clamp device, cover in foil, place argon or nitrogen gas nozzle into bottle.
[0946] 7. Prime the tubing.
[0947] 8. Log on to computer and start the run.
   [0948] a. Check Filter emissions/excitations for 560/610 nm and UV/blue filters

[0949] Day 3
[0950] 1. For each plate, normalize the red readings by dividing them by the blue readings to reduce fluid-based artifacts.
[0951] 2. Generate a hit list for the cherrypicker.

[0952] Exemplary Secondary Screen—Automated Method

[0953] Day 1
[0954] 1. Cherry pick designated hits into 200 ul/well SM buffer in a CP_Master 96 well costar plate.
[0955] 2. Save 1° screening plates at 4° C. until breakout is complete.

[0956] Day 2
[0957] 1. Plate 0.5 μL of each 1° hit from CP_Master plate with E. coli host onto 90 mm NZY plates.
[0958] 2. Plate “D7” positive and “N38” negative controls (aim for 50-100 plaques per plate) on separate 90 mm NZY plates.
[0959] 3. Incubate plates overnight in a dry 37° C. incubator.

[0960] Day 3
[0961] 1. Fill 384 well Sec_Master plates with 25 μL/well of 5% dispersed AVICEL® in 1× NZY+OD 0.03 E. coli host.
[0962] 2. Bring plates to Colony picker and “colony pick” 16 plaques per primary hit plate to a column of a 384 well plate (Columns 1-20)
[0963] 3. Pick “D7” positive control into column 21 and “N38” negative control into column 22.
[0964] 4. Incubate in humidified incubator set to 37° C. overnight.

[0965] Day 4
[0966] 1. Prepare 2× assay cocktail as described for the primary screen.
[0967] 2. Run assay on Robot as described above.
[0968] 3. Cherry Pick 2° hits into 96 well Sec_PCR plate.
[0969] 4. Store phage stocks at 4° C.

[0970] Exemplary Secondary Screen—Manual Method

[0971] Day 1
[0972] 1. If primary screening plates have not been cherry-picked, take 1 μL of each hit from the primary screening plate and dilute it in 500μL SM buffer. Plate 1 μL of this dilution with E. coli host onto NZY agar plates as described.
[0973] 2. If using cherry-picked hits, plate 0.5 μL of each hit from the CP_Master plate as described above.
[0974] 3. Plate “D7” positive and “N38” negative controls (aim for 50-100 plaques per plate) on separate 90 mm NZY plates.
[0975] 4. Incubate plates overnight in a dry 37° C. incubator.

[0976] Day 2
[0977] 1. Prepare 384-well recipient plates for picking. Dispense 25 μL/well of the following suspension: 5% dispersed AVICEL® in 1× NZY with E. coli host at OD₆₀₀ 0.03.
[0978] 2. Use sterile toothpicks or sterile pipet tips to gently touch the surface of each isolated plaque and transfer to a well of the 384-well recipient plate. Pick 16 isolates (one column-worth) per 1° hit.
[0979] 3. Incubate the plate(s) (“breakout plate”) in humidified incubator set to 37° C. overnight.

[0980] Day 3
[0981] 1. Prepare 2× assay cocktail as described for the primary screen.
[0982] 2. Add 2× assay cocktail to “breakout plate” at 25 μL/well, incubate at room temperature (shielded from light) for 30 minutes, then read fluorescence at both 535/595 nm and 360/465 nm.
[0983] 3. Divide the red readings by the blue and identify any 2° hits.
[0984] 4. If a 2° hit is identified, pull the contents of the well corresponding to a positive isolate and add to 1 mL SM buffer+100 μL CHCl₃. Vortex and store phage stock at 4° C.

### Reagents and Supplies:

### 2× NZY Concentrate, 13% Dispersed AVICEL®

[0985] Measure 130 grams AVICEL® microcrystalline cellulose (FMC Biopolymer (Philadelphia, Pa.): type PH 105, grade NF/EP) into a clean, high-speed blender and add 18 MΩ dI water to the 1 L measuring line (about 916 mL). Close the lid and blend at highest speed for 20 minutes. Transfer the suspension to an autoclave-safe container and autoclave using the 30 minute “liquid” cycle. Store at room temperature.

### Na Phosphate Buffer pH 7.4 (800 mM Stock)

[0986] Phosphate buffer stock is made at 800 mM to avoid precipitation that sometimes occurs with 1 M stocks. For 1 Liter of 800 mM buffer, combine 90.7 grams Na₂HPO₄ (MW 141.96) with 22.2 grams NaH₂PO₄.H₂O (MW 137.99) and dissolve in about 950 mL dI water. Adjust the pH to 7.4 if necessary with either NaOH or phosphoric acid, then either sterile filter or autoclave.

### SEQ ID NO:424 Enzyme—Control; GO/HRP Mix

[0987] Glucose oxidase: Sigma #G7141-50KU. Dissolve all 50,000 units in 5 mL 50 mM phosphate, pH 7.4 buffer.

[0988] Horseradish peroxidase: Sigma #P2088-5KU. Dissolve all 5,000 units in 5 mL 50 mM phosphate, pH 7.4 buffer.

[0989] Combine Glucose oxidase and HRP solutions. Use a sterile syringe to add an equal volume (10 mL) of sterile glycerol. Mix well. This gives 20 mL of solution with final concentrations: 2,500 U/mL GO; 250 U/mL HRP.

### Amplex Red

[0990] Molecular Probes #A22177 (10×10-mg vials, MW =257.25). Dissolve each 10 mg vial in 0.777 mL DMSO to produce a 50 mM stock. Pool as needed. Store unused stocks at −20° C. protected from light.

### Black 384-Well Plates

[0991] Costar 384-well plates 3709 Fisher 07-200-652

### Preparation of E. Coli Host Cultures

### Components Needed

[0992] O/N culture or streak plate of the E. coli host. Use LB medium+20 μg/mL tetracycline antibiotic for liquid cultures and streak plates.
[0993] sterile 250 mL shake flask
[0994] LB supplemented with 20 μg/mL tetracycline
[0995] sterile centrifuge tubes
[0996] sterile 10 mM MgSO4 solution

### Protocol

[0997] 1. In a sterile 250-mL flask, inoculate 100 mL LB medium+20 μg/mL tetracycline with 1 mL of overnight E. coli host culture.
[0998] 2. Grow the culture in a 37° C./240 rpm shaker to OD₆₀₀ 0.8-1.0 (typically 2-4 hours).
[0999] 3. Centrifuge the culture at 1,100× g for 10 minutes (e.g., 2351 rpm in Eppendorf 5810R).
[1000] 4. Gently resuspend the pellet in 10 mM MgSO₄ to OD₆₀₀=1.0.
[1001] 5. Store prepared host cells on ice or at 4° C. Host preps should be good for about a week.

### General Protocol for Plating Lambda Phage

### Components Needed

[1002] OD1 host prep
[1003] sterile Falcon 2054 tubes (or 2059 tubes if using 150 mm plates)
[1004] molten NZY top agar, equilibrated at 50° C.
[1005] NZY plates, warmed to room temperature

[1006] The amount of OD1 host prep and molten top agar required depends on the size of the NZY plates used. General guidelines follow:

| Size of NZY plate | Volume OD1 host prep | Volume of molten top agar |
|---|---|---|
| 90 mm | 100 μL | 2.5 mL |
| 150 mm | 250 μL | 7 mL |

### General Protocol

[1007] 1. Aliquot the recommended amount of OD1 host prep (see table above) into a sterile 2054 or 2059 tube.
[1008] 2. Carefully pipet the required volume of lambda phage stock into the aliquoted host cells and mix by gentle vortexing.
[1009] 3. Let the phage adsorb to host by incubating at room temperature for 15 minutes (no shaking required).
[1010] 4. Plate the phage by adding the appropriate volume of 50° C. molten top agar (see table above) to the tube and quickly pour over NZY plates. Carefully tilt the plate from side to side to ensure a smooth, even distribution before the top agar hardens.
[1011] 5. Invert plates and incubate overnight in a dry 37° C. incubator. Note that some NZY plates are very moist. To prevent moisture problems during incubation, these plates need to be vented before placing them in the incubator.

### Titering Lambda Libraries

[1012] 1. Make 10⁻⁵, 10⁻⁶, and 10⁻⁷ dilutions of the library in SM buffer. Note that more conservative dilutions will be necessary for older libraries that have titers less than 10⁵ per μL (<10⁸ per mL).
[1013] 2. Pipet 100 μL of OD1 host prep to each of three Falcon 2054 tubes.
[1014] 3. Carefully add 100 μL of each dilution to a separate 2054 tube containing host cells.
[1015] 4. Adsorb, plate and incubate as described in steps 3-5 of General Protocol For Plating Lambda Phage above.
[1016] 5. Count plaques and calculate titer of the library stock (in pfu per μL). If possible, use the dilution that results in between 50-200 plaques. For example, if the plate containing 100 μL of 10⁻⁶ dilution gave 157 plaques, the library titer is about 1.6×10⁶ pfu/μL.

[1017] The following table summarizes data from these exemplary protocols; to aid in reading the table, for the column labeled “Exemplary Enzyme” (of the invention), for example, the first row reads “7, 8”, which is read as the enzyme having the amino acid sequence of SEQ ID NO:8, encoded, e.g., by the nucleic acid sequence of SEQ ID NO:7; etc. “Avicel” is AVICEL® as described above. GH family means “glycosyl hydrolase” family. “True” and “False” represent “enzymatically active” or “not active”, respectively, under the indicated conditions. Reaction time is in minutes.

| | | | | | Substrate | | | | | | | | |
|---|---|---|---|---|---|---|---|---|---|---|---|---|---|
| Exemplary | GH | Expression | % | | concen- | Enzyme | Reaction | pH 5, | pH 7, | pH 9, | pH 5, | pH 7, | pH 9, |
| enzyme | family | Host | purity | Substrate | tration | loading | Time | 37° C. | 37° C. | 37° C. | 55° C. | 55° C. | 55° C. |
| 7, 8 | 5 | E. coli | | Avicel | 0.004 | 0.1 mg/ml | 48 | TRUE | TRUE | TRUE | TRUE | TRUE | TRUE |
| 427, 428 | 9 | E. coli | ? | Avicel | 0.004 | 0.1 mg/ml | 48 | TRUE | TRUE | TRUE | TRUE | TRUE | FALSE |
| 427, 428 | 9 | E. coli | ? | Avicel | 0.004 | 0.1 mg/ml | 48 | TRUE | TRUE | TRUE | TRUE | TRUE | FALSE |
| 9, 10 | 5 | E. coli | | Avicel | 0.004 | 0.1 mg/ml | 48 | TRUE | TRUE | TRUE | TRUE | TRUE | TRUE |
| 361, 362 | 9 | E. coli | 12.1% | Avicel | 0.005 | 0.1 mg/ml | 44.5 | TRUE | TRUE | TRUE | TRUE | TRUE | TRUE |
| 5, 6 | 6 | E. coli | 3.8% | Avicel | 0.005 | 0.1 mg/ml | 44.5 | TRUE | TRUE | TRUE | TRUE | TRUE | TRUE |
| 13, 14 | 6 | E. coli | 3.1% | Avicel | 0.005 | 0.1 mg/ml | 44.5 | TRUE | TRUE | TRUE | TRUE | FALSE | FALSE |
| 11, 12 | 6 | E. coli | 4.9% | Avicel | 0.005 | 0.1 mg/ml | 44.5 | TRUE | TRUE | TRUE | TRUE | TRUE | FALSE |
| 25, 26 | 6 | P. pastoris | 36.1% | Avicel | 0.004 | 0.1 mg/ml | 46 | TRUE | TRUE | TRUE | TRUE | TRUE | TRUE |
| 37, 38 | 48 | P. pastoris | 2.6% | Avicel | 0.004 | 0.1 mg/ml | 46 | TRUE | TRUE | TRUE | TRUE | TRUE | TRUE |
| 1, 2 | 6 | E. coli | 9.4% | Avicel | 0.005 | 0.1 mg/ml | 44.5 | TRUE | TRUE | TRUE | TRUE | TRUE | TRUE |
| 3, 4 | 6 | P. pastoris | 3.3% | Avicel | 0.004 | 0.1 mg/ml | 48 | TRUE | TRUE | TRUE | TRUE | TRUE | TRUE |
| 23, 24 | 6 | P. pastoris | 8.2% | Avicel | 0.005 | 0.1 mg/ml | 44.5 | FALSE | FALSE | FALSE | TRUE | TRUE | TRUE |
| 353, 354 | 6 | P. pastoris | 15.7% | Avicel | 0.005 | 0.1 mg/ml | 44.5 | FALSE | FALSE | TRUE | TRUE | TRUE | TRUE |
| 39, 40 | 48 | P. pastoris | 5.5% | Avicel | 0.004 | 0.1 mg/ml | 46 | TRUE | TRUE | TRUE | TRUE | TRUE | TRUE |
| 47, 48 | 9 | E. coli | | Avicel | 0.005 | 0.1 mg/ml | 44.5 | TRUE | TRUE | TRUE | FALSE | FALSE | FALSE |
| 49, 50 | 5 | E. coli | 4.8% | Avicel | 0.005 | 0.1 mg/ml | 44.5 | TRUE | TRUE | TRUE | FALSE | FALSE | FALSE |
| 51, 52 | 9 | E. coli | 3.9% | Avicel | 0.005 | 0.1 mg/ml | 44.5 | FALSE | TRUE | FALSE | FALSE | FALSE | FALSE |
| 43, 44 | 9 | E. coli | 6.4% | Avicel | 0.005 | 0.1 mg/ml | 44.5 | FALSE | TRUE | TRUE | FALSE | FALSE | FALSE |
| 57, 58 | 9 | E. coli | 8.3% | Avicel | 0.005 | 0.1 mg/ml | 44.5 | TRUE | TRUE | TRUE | FALSE | FALSE | FALSE |
| 55, 56 | 5 | E. coli | 12.4% | Avicel | 0.005 | 0.1 mg/ml | 44.5 | TRUE | TRUE | TRUE | FALSE | FALSE | FALSE |
| 59, 60 | 45 | E. coli | 5.8% | Avicel | 0.005 | 0.1 mg/ml | 44.5 | TRUE | TRUE | TRUE | FALSE | FALSE | FALSE |
| 61, 62 | 9 | E. coli | 9.8% | Avicel | 0.005 | 0.1 mg/ml | 44.5 | FALSE | TRUE | TRUE | FALSE | FALSE | FALSE |
| 53, 54 | 5 | E. coli | 11.4% | Avicel | 0.005 | 0.1 mg/ml | 44.5 | FALSE | TRUE | TRUE | FALSE | FALSE | FALSE |
| 65, 66 | 5 | E. coli | 10.7% | Avicel | 0.005 | 0.1 mg/ml | 44.5 | TRUE | TRUE | TRUE | FALSE | FALSE | FALSE |
| 41, 42 | 5 | E. coli | 3.0% | Avicel | 0.004 | 0.1 mg/ml | 47 | TRUE | TRUE | TRUE | TRUE | TRUE | FALSE |
| 365, 366 | 8 | E. coli | 8.6% | Avicel | 0.005 | 0.1 mg/ml | 44.5 | TRUE | TRUE | TRUE | TRUE | TRUE | TRUE |
| 67, 68 | 5 | E. coli | 6.4% | Avicel | 0.004 | 0.1 mg/ml | 47 | TRUE | TRUE | TRUE | FALSE | FALSE | FALSE |
| 17, 18 | 16 | E. coli | ? | Avicel | 0.004 | 0.1 mg/ml | 47 | TRUE | TRUE | TRUE | FALSE | FALSE | FALSE |
| 77, 78 | 5 | E. coli | 4.4% | Avicel | 0.005 | 0.1 mg/ml | 44.5 | TRUE | TRUE | TRUE | FALSE | FALSE | FALSE |
| 73, 74 | 5 | E. coli | 7.4% | Avicel | 0.005 | 0.1 mg/ml | 44.5 | TRUE | TRUE | TRUE | FALSE | FALSE | FALSE |
| 363, 364 | 18 | E. coli | 11.5% | Avicel | 0.005 | 0.1 mg/ml | 44.5 | TRUE | TRUE | TRUE | TRUE | TRUE | TRUE |
| 45, 46 | ARF | E. coli | ? | Avicel | 0.004 | 0.1 mg/ml | 47 | TRUE | TRUE | TRUE | TRUE | TRUE | TRUE |
| 63, 64 | 9 | E. coli | 8.0% | Avicel | 0.004 | 0.1 mg/ml | 47 | TRUE | FALSE | FALSE | FALSE | FALSE | FALSE |
| 75, 76 | 9 | E. coli | 10.5% | Avicel | 0.004 | 0.1 mg/ml | 47 | FALSE | TRUE | TRUE | FALSE | TRUE | TRUE |
| 87, 88 | 5 | E. coli | 10.7% | Avicel | 0.005 | 0.1 mg/ml | 44.5 | TRUE | TRUE | TRUE | FALSE | FALSE | FALSE |
| 83, 84 | 5 | E. coli | 10.4% | Avicel | 0.005 | 0.1 mg/ml | 44.5 | FALSE | TRUE | TRUE | FALSE | FALSE | FALSE |
| 81, 82 | ARF | E. coli | ? | Avicel | 0.005 | 0.1 mg/ml | 44.5 | TRUE | TRUE | TRUE | FALSE | FALSE | FALSE |
| 89, 90 | 5 | E. coli | 5.0% | Avicel | 0.005 | 0.1 mg/ml | 44.5 | TRUE | TRUE | TRUE | TRUE | TRUE | TRUE |
| 85, 86 | 9 | E. coli | 8.7% | Avicel | 0.005 | 0.1 mg/ml | 44.5 | TRUE | TRUE | TRUE | TRUE | TRUE | TRUE |
| 79, 80 | 5 | E. coli | 14.9% | Avicel | 0.005 | 0.1 mg/ml | 44.5 | TRUE | TRUE | TRUE | FALSE | FALSE | FALSE |
| 35, 36 | 6 | A. niger | >60% | Avicel | 0.004 | 0.1 mg/ml | 46.5 | TRUE | TRUE | TRUE | TRUE | TRUE | FALSE |
| 71, 72 | 45 | E. coli | 4.2% | Avicel | 0.005 | 0.1 mg/ml | 44.5 | FALSE | FALSE | FALSE | FALSE | FALSE | FALSE |
| 91, 92 | 48 | E. coli | 3.2% | Avicel | 0.004 | 0.1 mg/ml | 46 | TRUE | FALSE | FALSE | TRUE | FALSE | FALSE |
| 93, 94 | 48 | E. coli | 3.8% | Avicel | 0.005 | 0.1 mg/ml | 44.5 | FALSE | TRUE | FALSE | FALSE | FALSE | FALSE |
| 95, 96 | 48 | E. coli | 6.2% | Avicel | 0.005 | 0.1 mg/ml | 44.5 | FALSE | FALSE | FALSE | TRUE | FALSE | FALSE |
| 99, 100 | 48 | E. coli | 4.4% | Avicel | 0.005 | 0.1 mg/ml | 44.5 | FALSE | FALSE | FALSE | FALSE | FALSE | FALSE |
| 131, 132 | 5 | E. coli | 10.7% | Avicel | 0.004 | 0.1 mg/ml | 48 | FALSE | TRUE | TRUE | FALSE | TRUE | TRUE |
| 133, 134 | 5 | E. coli | 4.1% | Avicel | 0.004 | 0.1 mg/ml | 48 | TRUE | TRUE | TRUE | FALSE | FALSE | FALSE |
| 109, 110 | 5 | E. coli | 2.7% | Avicel | 0.004 | 0.1 mg/ml | 46 | TRUE | TRUE | TRUE | FALSE | FALSE | FALSE |
| 117, 118 | 5 | E. coli | 5.5% | Avicel | 0.004 | 0.1 mg/ml | 48 | TRUE | TRUE | TRUE | TRUE | TRUE | TRUE |
| 355, 356 | 7 | A. niger | 70.0% | Avicel | 0.005 | 0.1 mg/ml | 44.5 | TRUE | TRUE | FALSE | TRUE | TRUE | FALSE |
| 33, 34 | 7 | A. niger | 70.0% | Avicel | 0.005 | 0.1 mg/ml | 44.5 | TRUE | TRUE | FALSE | TRUE | TRUE | FALSE |
| 359, 360 | 7 | A. niger | 80.0% | Avicel | 0.005 | 0.1 mg/ml | 44.5 | TRUE | TRUE | FALSE | TRUE | TRUE | FALSE |
| 121, 122 | 5 | E. coli | ? | Avicel | 0.004 | 0.1 mg/ml | 47 | FALSE | TRUE | TRUE | TRUE | TRUE | TRUE |
| 139, 140 | 48 | E. coli | 4.4% | Avicel | 0.004 | 0.1 mg/ml | 46.5 | TRUE | TRUE | TRUE | TRUE | TRUE | TRUE |
| 143, 144 | 5 | E. coli | ? | Avicel | 0.004 | 0.1 mg/ml | 47 | TRUE | TRUE | TRUE | TRUE | TRUE | TRUE |
| 145, 146 | 9 | E. coli | 26.1% | Avicel | 0.004 | 0.1 mg/ml | 47 | FALSE | TRUE | TRUE | FALSE | TRUE | TRUE |
| 147, 148 | 5 | E. coli | 17.3% | Avicel | 0.004 | 0.1 mg/ml | 47 | TRUE | TRUE | TRUE | FALSE | FALSE | FALSE |
| 151, 152 | 9 | E. coli | 21.7% | Avicel | 0.004 | 0.1 mg/ml | 47 | FALSE | TRUE | FALSE | FALSE | FALSE | FALSE |
| 153, 154 | 5 | E. coli | v. low | Avicel | 0.004 | 0.1 mg/ml | 47 | TRUE | TRUE | TRUE | FALSE | FALSE | FALSE |
| 157, 158 | 5 | E. coli | 3.9% | Avicel | 0.004 | 0.1 mg/ml | 47 | TRUE | TRUE | TRUE | FALSE | FALSE | FALSE |
| 159, 160 | 5 | E. coli | 10.9% | Avicel | 0.004 | 0.1 mg/ml | 47 | TRUE | TRUE | TRUE | FALSE | FALSE | TRUE |
| 167, 168 | 5 | E. coli | 8.4% | Avicel | 0.004 | 0.1 mg/ml | 47 | TRUE | TRUE | TRUE | FALSE | FALSE | FALSE |
| 141, 142 | 5 | E. coli | 3% | Avicel | 0.004 | 0.1 mg/ml | 46.5 | FALSE | FALSE | FALSE | FALSE | FALSE | FALSE |
| 161, 162 | 45 | E. coli | 3.1% | Avicel | 0.004 | 0.1 mg/ml | 47 | FALSE | TRUE | TRUE | FALSE | FALSE | FALSE |
| 105, 106 | 5 | E. coli | ? | Avicel | 0.004 | 0.1 mg/ml | 47 | FALSE | FALSE | TRUE | FALSE | FALSE | FALSE |
| 129, 130 | 5 | E. coli | 15.3% | Avicel | 0.004 | 0.1 mg/ml | 47 | FALSE | TRUE | TRUE | FALSE | TRUE | TRUE |
| 107, 108 | 45 | E. coli | 6.0% | Avicel | 0.004 | 0.1 mg/ml | 47 | TRUE | TRUE | TRUE | TRUE | TRUE | TRUE |
| 103, 104 | 5 | E. coli | ? | Avicel | 0.004 | 0.1 mg/ml | 46.5 | TRUE | TRUE | FALSE | FALSE | FALSE | FALSE |
| 111, 112 | 5 | E. coli | 7.7% | Avicel | 0.004 | 0.1 mg/ml | 47 | TRUE | TRUE | TRUE | TRUE | FALSE | FALSE |
| 169, 170 | 48 | E. coli | ? | Avicel | 0.004 | 0.1 mg/ml | 48 | TRUE | TRUE | TRUE | TRUE | TRUE | TRUE |
| 171, 172 | 48 | E. coli | 7.6% | Avicel | 0.004 | 0.1 mg/ml | 48 | TRUE | TRUE | FALSE | FALSE | FALSE | FALSE |
| 175, 176 | 48 | E. coli | 11.9% | Avicel | 0.004 | 0.1 mg/ml | 48 | TRUE | TRUE | TRUE | TRUE | TRUE | TRUE |
| 177, 178 | 48 | E. coli | ? | Avicel | 0.004 | 0.1 mg/ml | 48 | FALSE | TRUE | TRUE | FALSE | TRUE | TRUE |
| 357, 358 | 6 | A. niger | >85% | Avicel | 0.004 | 0.1 mg/ml | 46.5 | TRUE | TRUE | TRUE | TRUE | TRUE | TRUE |
| 155, 156 | 9 | E. coli | 14.5% | Avicel | 0.004 | 0.1 mg/ml | 46 | FALSE | TRUE | TRUE | FALSE | FALSE | FALSE |
| 173, 174 | 48 | E. coli | 13.3% | Avicel | 0.004 | 0.1 mg/ml | 46 | TRUE | TRUE | TRUE | TRUE | TRUE | FALSE |
| 149, 150 | 5 | E. coli | 4.7% | Avicel | 0.004 | 0.1 mg/ml | 45.5 | FALSE | FALSE | FALSE | FALSE | FALSE | FALSE |
| 183, 184 | 6 | E. coli | ? | Avicel | 0.004 | 0.1 mg/ml | 46 | FALSE | FALSE | FALSE | FALSE | FALSE | FALSE |
| 185, 186 | 6 | E. coli | <3% | Avicel | 0.004 | 0.1 mg/ml | | FALSE | FALSE | FALSE | FALSE | FALSE | FALSE |
| 187, 188 | 48 | E. coli | 13.6% | Avicel | 0.004 | 0.1 mg/ml | 46 | TRUE | TRUE | TRUE | TRUE | TRUE | FALSE |
| 191, 192 | 6 | E. coli | 4.3% | Avicel | 0.004 | 0.1 mg/ml | 46 | FALSE | TRUE | TRUE | FALSE | TRUE | FALSE |
| 113, 114 | 5 | E. coli | 5.5% | Avicel | 0.004 | 0.1 mg/ml | 46 | FALSE | FALSE | FALSE | FALSE | FALSE | FALSE |
| 113, 114 | 5 | E. coli | <3% | Avicel | 0.004 | 0.1 mg/ml | 45.5 | FALSE | FALSE | FALSE | FALSE | FALSE | FALSE |
| 113, 114 | 5 | E. coli | | Avicel | 0.004 | 0.1 mg/ml | 46 | FALSE | FALSE | FALSE | FALSE | FALSE | FALSE |
| 119, 120 | 5 | E. coli | <3% | Avicel | 0.004 | 0.1 mg/ml | 45.5 | FALSE | TRUE | TRUE | FALSE | FALSE | FALSE |
| 31, 32 | 7 | A. niger | | Avicel | 0.004 | 0.1 mg/ml | 46 | TRUE | TRUE | FALSE | TRUE | TRUE | FALSE |
| 369-371 | 7 | A. niger | >90% | Avicel | 0.004 | 0.1 mg/ml | 45.5 | TRUE | TRUE | TRUE | TRUE | TRUE | TRUE |
| 369-371 | 7 | A. niger | | Avicel | 0.004 | 0.1 mg/ml | 46 | TRUE | TRUE | TRUE | TRUE | TRUE | TRUE |
| 189, 190 | 48 | E. coli | <3% | Avicel | 0.004 | 0.1 mg/ml | | FALSE | FALSE | FALSE | FALSE | FALSE | FALSE |
| 179, 180 | 48 | E. coli | <3% | Avicel | 0.004 | 0.1 mg/ml | | FALSE | FALSE | FALSE | FALSE | FALSE | FALSE |
| 163, 164 | 6 | E. coli | <3% | Avicel | 0.004 | 0.1 mg/ml | | FALSE | FALSE | FALSE | FALSE | FALSE | FALSE |
| 181, 182 | 6 | E. coli | <3% | Avicel | 0.004 | 0.1 mg/ml | | FALSE | FALSE | FALSE | FALSE | FALSE | FALSE |
| 165, 166 | 6 | E. coli | 5.0% | Avicel | 0.004 | 0.1 mg/ml | | FALSE | FALSE | FALSE | FALSE | FALSE | FALSE |
| 367, 368 | 9 | E. coli | 11.1% | Avicel | 0.004 | 0.1 mg/ml | 46 | FALSE | TRUE | TRUE | FALSE | TRUE | FALSE |
| 201, 202 | 6 | E. coli | <3% | Avicel | 0.004 | 0.1 mg/ml | 45.5 | FALSE | TRUE | FALSE | FALSE | FALSE | FALSE |
| 135, 136 | 48 | E. coli | <3% | Avicel | 0.004 | 0.1 mg/ml | 45.5 | TRUE | TRUE | TRUE | FALSE | FALSE | FALSE |
| 135, 136 | 48 | E. coli | | Avicel | 0.004 | 0.1 mg/ml | 48 | TRUE | TRUE | TRUE | TRUE | TRUE | TRUE |
| 207, 208 | 48 | E. coli | 2.2% | Avicel | 0.004 | 0.1 mg/ml | 45.5 | FALSE | FALSE | FALSE | FALSE | FALSE | FALSE |
| 209, 210 | 6 | E. coli | <3% | Avicel | 0.004 | 0.1 mg/ml | 45.5 | FALSE | TRUE | TRUE | FALSE | FALSE | FALSE |
| 211, 212 | 9 | E. coli | 10.1% | Avicel | 0.004 | 0.1 mg/ml | 45.5 | FALSE | TRUE | FALSE | FALSE | FALSE | FALSE |
| 211, 212 | 9 | E. coli | | Avicel | 0.004 | 0.1 mg/ml | 46 | FALSE | TRUE | FALSE | FALSE | FALSE | FALSE |
| 125, 126 | 5 | E. coli | <3% | Avicel | 0.004 | 0.1 mg/ml | 45.5 | FALSE | FALSE | FALSE | FALSE | FALSE | FALSE |
| 125, 126 | 5 | E. coli | | Avicel | 0.004 | 0.1 mg/ml | 48 | FALSE | FALSE | FALSE | FALSE | FALSE | FALSE |
| 97, 98 | 48 | P. pastoris | 5.3% | Avicel | 0.004 | 0.1 mg/ml | 47.75 | TRUE | TRUE | TRUE | TRUE | TRUE | TRUE |
| 101, 102 | 48 | P. pastoris | 4.6% | Avicel | 0.004 | 0.1 mg/ml | 47.75 | TRUE | TRUE | TRUE | TRUE | TRUE | TRUE |
| 193, 194 | 48 | E. coli | 6.2% | Avicel | 0.004 | 0.1 mg/ml | 45.5 | TRUE | TRUE | TRUE | FALSE | FALSE | FALSE |
| 193, 194 | 48 | E. coli | | Avicel | 0.004 | 0.1 mg/ml | 46 | TRUE | TRUE | TRUE | TRUE | TRUE | TRUE |
| 241, 242 | 48 | E. coli | <3% | Avicel | 0.004 | 0.1 mg/ml | 47.75 | TRUE | TRUE | TRUE | FALSE | FALSE | FALSE |
| 213, 214 | 5 | E. coli | 5.3% | Avicel | 0.004 | 0.1 mg/ml | 47.75 | TRUE | TRUE | TRUE | FALSE | FALSE | FALSE |
| 231, 232 | 9 | E. coli | 6.4% | Avicel | 0.004 | 0.1 mg/ml | 47.75 | FALSE | TRUE | TRUE | FALSE | FALSE | FALSE |
| 247, 248 | 9 | E. coli | 5.5% | Avicel | 0.004 | 0.1 mg/ml | 47.75 | TRUE | TRUE | TRUE | FALSE | FALSE | FALSE |
| 245, 246 | 9 | E. coli | 6.4% | Avicel | 0.004 | 0.1 mg/ml | 47.75 | FALSE | TRUE | TRUE | FALSE | FALSE | FALSE |
| 249, 250 | 5 | E. coli | 5.0% | Avicel | 0.004 | 0.1 mg/ml | 47.75 | TRUE | TRUE | TRUE | FALSE | FALSE | FALSE |
| 235, 236 | 6 | E. coli | | Avicel | 0.004 | 0.1 mg/ml | 48 | TRUE | TRUE | TRUE | TRUE | TRUE | TRUE |
| 263, 264 | 48 | E. coli | | Avicel | 0.004 | 0.1 mg/ml | 48 | TRUE | TRUE | TRUE | TRUE | TRUE | TRUE |
| 281, 282 | 6 | A. niger | 100 | Avicel | 0.004 | 0.1 mg/ml | 46 | TRUE | TRUE | TRUE | TRUE | TRUE | FALSE |
| 261, 262 | 5 | E. coli | <3% | Avicel | 0.004 | 0.1 mg/ml | 46 | TRUE | TRUE | TRUE | TRUE | TRUE | TRUE |
| 261, 262 | 5 | E. coli | 5.8% | Avicel | 0.004 | 0.1 mg/ml | 46 | TRUE | TRUE | TRUE | TRUE | TRUE | TRUE |
| 233, 234 | 5 | E. coli | | Avicel | 0.004 | 0.1 mg/ml | 48 | FALSE | TRUE | TRUE | TRUE | TRUE | TRUE |
| 219, 220 | 6 | E. coli | | Avicel | 0.004 | 0.1 mg/ml | 48 | FALSE | TRUE | TRUE | TRUE | TRUE | TRUE |
| 239, 240 | 6 | E. coli | | Avicel | 0.004 | 0.1 mg/ml | 48 | TRUE | TRUE | TRUE | TRUE | TRUE | TRUE |
| 217, 218 | 6 | E. coli | | Avicel | 0.004 | 0.1 mg/ml | 48 | TRUE | TRUE | TRUE | TRUE | TRUE | TRUE |
| 251, 252 | 45 | E. coli | <3% | Avicel | 0.004 | 0.1 mg/ml | 46 | TRUE | TRUE | TRUE | TRUE | TRUE | FALSE |
| 181, 182 | 6 | S. diversa | 4.3% | Avicel | 0.004 | 0.1 mg/ml | 44.5 | TRUE | TRUE | TRUE | TRUE | TRUE | TRUE |
| 181, 182 | 6 | S. diversa | 2.4% | Avicel | 0.004 | 0.1 mg/ml | 44.5 | TRUE | TRUE | TRUE | TRUE | TRUE | TRUE |
| 225, 226 | 6 | S. diversa | 4.4% | Avicel | 0.004 | 0.1 mg/ml | 44.5 | TRUE | TRUE | TRUE | TRUE | TRUE | TRUE |
| 229, 230 | 6 | S. diversa | 6.3% | Avicel | 0.004 | 0.1 mg/ml | 44.5 | TRUE | TRUE | TRUE | TRUE | TRUE | TRUE |
| 221, 222 | 6 | S. diversa | 3.3% | Avicel | 0.004 | 0.1 mg/ml | 44.5 | TRUE | TRUE | TRUE | TRUE | TRUE | TRUE |
| 223, 224 | 6 | S. diversa | 3.5% | Avicel | 0.004 | 0.1 mg/ml | 44.5 | TRUE | TRUE | TRUE | TRUE | TRUE | TRUE |
| 185, 186 | 6 | S. diversa | 7.9% | Avicel | 0.004 | 0.1 mg/ml | 44.5 | TRUE | TRUE | TRUE | TRUE | TRUE | TRUE |
| 139, 140 | 6 | S. diversa | 3.5% | Avicel | 0.004 | 0.1 mg/ml | 44.5 | TRUE | TRUE | TRUE | TRUE | TRUE | TRUE |
| 165, 166 | 6 | S. diversa | 5.5% | Avicel | 0.004 | 0.1 mg/ml | 44.5 | TRUE | TRUE | TRUE | TRUE | TRUE | TRUE |

| | GH | Expression | % | | Substrate | Enzyme | Reaction | Preferred | Preferred | |
|---|---|---|---|---|---|---|---|---|---|---|
| Exemplary enzyme | family | Host | purity | Substrate | concentration | loading | Time | pH | temperat. | Max conversion |
| 7, 8 | 5 | E. coli | | Avicel | 0.004 | 0.1 mg/ml | 48 | 7 | 55 | 0.62% |
| 427, 428 | 9 | E. coli | ? | Avicel | 0.004 | 0.1 mg/ml | 48 | 5 | 55 | 2.76% |
| 427, 428 | 9 | E. coli | ? | Avicel | 0.004 | 0.1 mg/ml | 48 | 5 | 55 | 4.82% |
| 9, 10 | 5 | E. coli | | Avicel | 0.004 | 0.1 mg/ml | 48 | 7 | 55 | 1.01% |
| 361, 362 | 9 | E. coli | 12.1% | Avicel | 0.005 | 0.1 mg/ml | 44.5 | 5 | 55 | 1.35% |
| 5, 6 | 6 | E. coli | 3.8% | Avicel | 0.005 | 0.1 mg/ml | 44.5 | 5 | 37 | 0.85% |
| 13, 14 | 6 | E. coli | 3.1% | Avicel | 0.005 | 0.1 mg/ml | 44.5 | 5 | 37 | 0.11% |
| 11, 12 | 6 | E. coli | 4.9% | Avicel | 0.005 | 0.1 mg/ml | 44.5 | 5 | 37 | 0.26% |
| 25, 26 | 6 | P. pastoris | 36.1% | Avicel | 0.004 | 0.1 mg/ml | 46 | 9 | 37 | 0.38% |
| 37, 38 | 48 | P. pastoris | 2.6% | Avicel | 0.004 | 0.1 mg/ml | 46 | 7 | 55 | 1.14% |
| 1, 2 | 6 | E. coli | 9.4% | Avicel | 0.005 | 0.1 mg/ml | 44.5 | 5 | 55 | 0.35% |
| 3, 4 | 6 | P. pastoris | 3.3% | Avicel | 0.004 | 0.1 mg/ml | 48 | 5 | 37 | 0.57% |
| 23, 24 | 6 | P. pastoris | 8.2% | Avicel | 0.005 | 0.1 mg/ml | 44.5 | 5 | 55 | 0.19% |
| 353, 354 | 6 | P. pastoris | 15.7% | Avicel | 0.005 | 0.1 mg/ml | 44.5 | 5 | 55 | 0.33% |
| 39, 40 | 48 | P. pastoris | 5.5% | Avicel | 0.004 | 0.1 mg/ml | 46 | 5 | 55 | 1.26% |
| 47, 48 | 9 | E. coli | | Avicel | 0.005 | 0.1 mg/ml | 44.5 | 7 | 37 | 0.19% |
| 49, 50 | 5 | E. coli | 4.8% | Avicel | 0.005 | 0.1 mg/ml | 44.5 | 7 | 37 | 0.34% |
| 51, 52 | 9 | E. coli | 3.9% | Avicel | 0.005 | 0.1 mg/ml | 44.5 | 7 | 37 | 0.30% |
| 43, 44 | 9 | E. coli | 6.4% | Avicel | 0.005 | 0.1 mg/ml | 44.5 | 7 | 37 | 0.18% |
| 57, 58 | 9 | E. coli | 8.3% | Avicel | 0.005 | 0.1 mg/ml | 44.5 | 7 | 37 | 0.25% |
| 55, 56 | 5 | E. coli | 12.4% | Avicel | 0.005 | 0.1 mg/ml | 44.5 | 5 | 37 | 0.40% |
| 59, 60 | 45 | E. coli | 5.8% | Avicel | 0.005 | 0.1 mg/ml | 44.5 | 9 | 37 | 0.08% |
| 61, 62 | 9 | E. coli | 9.8% | Avicel | 0.005 | 0.1 mg/ml | 44.5 | 7 | 37 | 0.20% |
| 53, 54 | 5 | E. coli | 11.4% | Avicel | 0.005 | 0.1 mg/ml | 44.5 | 7 | 37 | 0.47% |
| 65, 66 | 5 | E. coli | 10.7% | Avicel | 0.005 | 0.1 mg/ml | 44.5 | 7 | 37 | 0.52% |
| 41, 42 | 5 | E. coli | 3.0% | Avicel | 0.004 | 0.1 mg/ml | 47 | 5 | 37 | 0.19% |
| 365, 366 | 8 | E. coli | 8.6% | Avicel | 0.005 | 0.1 mg/ml | 44.5 | 7 | 55 | 0.72% |
| 67, 68 | 5 | E. coli | 6.4% | Avicel | 0.004 | 0.1 mg/ml | 47 | 5 | 37 | 0.18% |
| 17, 18 | 16 | E. coli | ? | Avicel | 0.004 | 0.1 mg/ml | 47 | 5 | 37 | 0.17% |
| 77, 78 | 5 | E. coli | 4.4% | Avicel | 0.005 | 0.1 mg/ml | 44.5 | 5 | 37 | 0.46% |
| 73, 74 | 5 | E. coli | 7.4% | Avicel | 0.005 | 0.1 mg/ml | 44.5 | 5 | 37 | 0.37% |
| 363, 364 | 18 | E. coli | 11.5% | Avicel | 0.005 | 0.1 mg/ml | 44.5 | 7 | 55 | 0.40% |
| 45, 46 | ARF | E. coli | ? | Avicel | 0.004 | 0.1 mg/ml | 47 | 5 | 37 | 0.09% |
| 63, 64 | 9 | E. coli | 8.0% | Avicel | 0.004 | 0.1 mg/ml | 47 | 5 | 37 | 0.12% |
| 75, 76 | 9 | E. coli | 10.5% | Avicel | 0.004 | 0.1 mg/ml | 47 | 7 | 37 | 0.06% |
| 87, 88 | 5 | E. coli | 10.7% | Avicel | 0.005 | 0.1 mg/ml | 44.5 | 5 | 37 | 0.22% |
| 83, 84 | 5 | E. coli | 10.4% | Avicel | 0.005 | 0.1 mg/ml | 44.5 | 9 | 37 | 0.25% |
| 81, 82 | ARF | E. coli | ? | Avicel | 0.005 | 0.1 mg/ml | 44.5 | 7 | 37 | 0.17% |
| 89, 90 | 5 | E. coli | 5.0% | Avicel | 0.005 | 0.1 mg/ml | 44.5 | 5 | 37 | 0.57% |
| 85, 86 | 9 | E. coli | 8.7% | Avicel | 0.005 | 0.1 mg/ml | 44.5 | 5 | 55 | 0.23% |
| 79, 80 | 5 | E. coli | 14.9% | Avicel | 0.005 | 0.1 mg/ml | 44.5 | 7 | 37 | 0.42% |
| 35, 36 | 6 | A. niger | >60% | Avicel | 0.004 | 0.1 mg/ml | 46.5 | 5 | 37 | 0.43% |
| 71, 72 | 45 | E. coli | 4.2% | Avicel | 0.005 | 0.1 mg/ml | 44.5 | | | 0.06% |
| 91, 92 | 48 | E. coli | 3.2% | Avicel | 0.004 | 0.1 mg/ml | 46 | 5 | 55 | 0.09% |
| 93, 94 | 48 | E. coli | 3.8% | Avicel | 0.005 | 0.1 mg/ml | 44.5 | 7 | 37 | 0.05% |
| 95, 96 | 48 | E. coli | 6.2% | Avicel | 0.005 | 0.1 mg/ml | 44.5 | 5 | 55 | 0.12% |
| 99, 100 | 48 | E. coli | 4.4% | Avicel | 0.005 | 0.1 mg/ml | 44.5 | | | 0.05% |
| 131, 132 | 5 | E. coli | 10.7% | Avicel | 0.004 | 0.1 mg/ml | 48 | 7 | 37 | 0.48% |
| 133, 134 | 5 | E. coli | 4.1% | Avicel | 0.004 | 0.1 mg/ml | 48 | 9 | 37 | 0.35% |
| 109, 110 | 5 | E. coli | 2.7% | Avicel | 0.004 | 0.1 mg/ml | 46 | 7 | 37 | 0.09% |
| 117, 118 | 5 | E. coli | 5.5% | Avicel | 0.004 | 0.1 mg/ml | 48 | 7 | 37 | 0.21% |
| 355, 356 | 7 | A. niger | 70.0% | Avicel | 0.005 | 0.1 mg/ml | 44.5 | 5 | 37 | 1.94% |
| 33, 34 | 7 | A. niger | 70.0% | Avicel | 0.005 | 0.1 mg/ml | 44.5 | 5 | 55 | 4.56% |
| 359, 360 | 7 | A. niger | 80.0% | Avicel | 0.005 | 0.1 mg/ml | 44.5 | 5 | 55 | 5.12% |
| 121, 122 | 5 | E. coli | ? | Avicel | 0.004 | 0.1 mg/ml | 47 | 9 | 55 | 0.06% |
| 139, 140 | 48 | E. coli | 4.4% | Avicel | 0.004 | 0.1 mg/ml | 46.5 | 5 | 37 | 0.28% |
| 143, 144 | 5 | E. coli | ? | Avicel | 0.004 | 0.1 mg/ml | 47 | 9 | 37 | 0.10% |
| 145, 146 | 9 | E. coli | 26.1% | Avicel | 0.004 | 0.1 mg/ml | 47 | 7 | 37 | 0.09% |
| 147, 148 | 5 | E. coli | 17.3% | Avicel | 0.004 | 0.1 mg/ml | 47 | 5 | 37 | 0.30% |
| 151, 152 | 9 | E. coli | 21.7% | Avicel | 0.004 | 0.1 mg/ml | 47 | 7 | 37 | 0.15% |
| 153, 154 | 5 | E. coli | v. low | Avicel | 0.004 | 0.1 mg/ml | 47 | 5 | 37 | 0.26% |
| 157, 158 | 5 | E. coli | 3.9% | Avicel | 0.004 | 0.1 mg/ml | 47 | 5 | 37 | 0.25% |
| 159, 160 | 5 | E. coli | 10.9% | Avicel | 0.004 | 0.1 mg/ml | 47 | 9 | 37 | 0.36% |
| 167, 168 | 5 | E. coli | 8.4% | Avicel | 0.004 | 0.1 mg/ml | 47 | 5 | 37 | 0.26% |
| 141, 142 | 5 | E. coli | 3% | Avicel | 0.004 | 0.1 mg/ml | 46.5 | | | 0.01% |
| 161, 162 | 45 | E. coli | 3.1% | Avicel | 0.004 | 0.1 mg/ml | 47 | 9 | 37 | 0.07% |
| 105, 106 | 5 | E. coli | ? | Avicel | 0.004 | 0.1 mg/ml | 47 | 9 | 37 | 0.07% |
| 129, 130 | 5 | E. coli | 15.3% | Avicel | 0.004 | 0.1 mg/ml | 47 | 9 | 37 | 0.14% |
| 107, 108 | 45 | E. coli | 6.0% | Avicel | 0.004 | 0.1 mg/ml | 47 | 5 | 37 | 0.12% |
| 103, 104 | 5 | E. coli | ? | Avicel | 0.004 | 0.1 mg/ml | 46.5 | 7 | 37 | 0.07% |
| 111, 112 | 5 | E. coli | 7.7% | Avicel | 0.004 | 0.1 mg/ml | 47 | 9 | 37 | 0.22% |
| 169, 170 | 48 | E. coli | ? | Avicel | 0.004 | 0.1 mg/ml | 48 | 5 | 37 | 0.35% |
| 171, 172 | 48 | E. coli | 7.6% | Avicel | 0.004 | 0.1 mg/ml | 48 | 7 | 37 | 0.32% |
| 175, 176 | 48 | E. coli | 11.9% | Avicel | 0.004 | 0.1 mg/ml | 48 | 5 | 37 | 0.79% |
| 177, 178 | 48 | E. coli | ? | Avicel | 0.004 | 0.1 mg/ml | 48 | 7 | 37 | 0.13% |
| 357, 358 | 6 | A. niger | >85% | Avicel | 0.004 | 0.1 mg/ml | 46.5 | 5 | 55 | 1.98% |
| 155, 156 | 9 | E. coli | 14.5% | Avicel | 0.004 | 0.1 mg/ml | 46 | 7 | 37 | 0.33% |
| 173, 174 | 48 | E. coli | 13.3% | Avicel | 0.004 | 0.1 mg/ml | 46 | 5 | 37 | 0.77% |
| 149, 150 | 5 | E. coli | 4.7% | Avicel | 0.004 | 0.1 mg/ml | 45.5 | | | 0.02% |
| 183, 184 | 6 | E. coli | ? | Avicel | 0.004 | 0.1 mg/ml | 46 | | | 0.01% |
| 185, 186 | 6 | E. coli | <3% | Avicel | 0.004 | 0.1 mg/ml | | | | 0.01% |
| 187, 188 | 48 | E. coli | 13.6% | Avicel | 0.004 | 0.1 mg/ml | 46 | 7 | 37 | 0.48% |
| 191, 192 | 6 | E. coli | 4.3% | Avicel | 0.004 | 0.1 mg/ml | 46 | 9 | 37 | 0.26% |
| 113, 114 | 5 | E. coli | 5.5% | Avicel | 0.004 | 0.1 mg/ml | 46 | | | 0.01% |
| 113, 114 | 5 | E. coli | <3% | Avicel | 0.004 | 0.1 mg/ml | 45.5 | | | 0.02% |
| 113, 114 | 5 | E. coli | | Avicel | 0.004 | 0.1 mg/ml | 46 | | | 0.02% |
| 119, 120 | 5 | E. coli | <3% | Avicel | 0.004 | 0.1 mg/ml | 45.5 | 7 | 37 | 0.04% |
| 31, 32 | 7 | A. niger | | Avicel | 0.004 | 0.1 mg/ml | 46 | 5 | 55 | 2.43% |
| 369-371 | 7 | A. niger | >90% | Avicel | 0.004 | 0.1 mg/ml | 45.5 | 5 | 55 | 1.66% |
| 369-371 | 7 | A. niger | | Avicel | 0.004 | 0.1 mg/ml | 46 | 5 | 37 | 2.27% |
| 189, 190 | 48 | E. coli | <3% | Avicel | 0.004 | 0.1 mg/ml | | | | 0.01% |
| 179, 180 | 48 | E. coli | <3% | Avicel | 0.004 | 0.1 mg/ml | | | | 0.01% |
| 163, 164 | 6 | E. coli | <3% | Avicel | 0.004 | 0.1 mg/ml | | | | 0.01% |
| 181, 182 | 6 | E. coli | <3% | Avicel | 0.004 | 0.1 mg/ml | | | | 0.01% |
| 165, 166 | 6 | E. coli | 5.0% | Avicel | 0.004 | 0.1 mg/ml | | | | 0.02% |
| 367, 368 | 9 | E. coli | 11.1% | Avicel | 0.004 | 0.1 mg/ml | 46 | 7 | 37 | 0.33% |
| 201, 202 | 6 | E. coli | <3% | Avicel | 0.004 | 0.1 mg/ml | 45.5 | 7 | 37 | 0.03% |
| 135, 136 | 48 | E. coli | <3% | Avicel | 0.004 | 0.1 mg/ml | 45.5 | 5 | 37 | 0.16% |
| 135, 136 | 48 | E. coli | | Avicel | 0.004 | 0.1 mg/ml | 48 | 5 | 37 | 0.23% |
| 207, 208 | 48 | E. coli | 2.2% | Avicel | 0.004 | 0.1 mg/ml | 45.5 | | | 0.03% |
| 209, 210 | 6 | E. coli | <3% | Avicel | 0.004 | 0.1 mg/ml | 45.5 | 7 | 37 | 0.11% |
| 211, 212 | 9 | E. coli | 10.1% | Avicel | 0.004 | 0.1 mg/ml | 45.5 | 7 | 37 | 0.11% |
| 211, 212 | 9 | E. coli | | Avicel | 0.004 | 0.1 mg/ml | 46 | 7 | 37 | 0.08% |
| 125, 126 | 5 | E. coli | <3% | Avicel | 0.004 | 0.1 mg/ml | 45.5 | | | 0.03% |
| 125, 126 | 5 | E. coli | | Avicel | 0.004 | 0.1 mg/ml | 48 | | | 0.02% |
| 97, 98 | 48 | P. pastoris | 5.3% | Avicel | 0.004 | 0.1 mg/ml | 47.75 | 5 | 55 | 0.89% |
| 101, 102 | 48 | P. pastoris | 4.6% | Avicel | 0.004 | 0.1 mg/ml | 47.75 | 5 | 55 | 0.96% |
| 193, 194 | 48 | E. coli | 6.2% | Avicel | 0.004 | 0.1 mg/ml | 45.5 | 7 | 37 | 0.15% |
| 193, 194 | 48 | E. coli | | Avicel | 0.004 | 0.1 mg/ml | 46 | 7 | 37 | 0.13% |
| 241, 242 | 48 | E. coli | <3% | Avicel | 0.004 | 0.1 mg/ml | 47.75 | 5 | 37 | 0.17% |
| 213, 214 | 5 | E. coli | 5.3% | Avicel | 0.004 | 0.1 mg/ml | 47.75 | 5 | 37 | 0.46% |
| 231, 232 | 9 | E. coli | 6.4% | Avicel | 0.004 | 0.1 mg/ml | 47.75 | 7 | 37 | 0.29% |
| 247, 248 | 9 | E. coli | 5.5% | Avicel | 0.004 | 0.1 mg/ml | 47.75 | 7 | 37 | 0.22% |
| 245, 246 | 9 | E. coli | 6.4% | Avicel | 0.004 | 0.1 mg/ml | 47.75 | 7 | 37 | 0.24% |
| 249, 250 | 5 | E. coli | 5.0% | Avicel | 0.004 | 0.1 mg/ml | 47.75 | 5 | 37 | 0.47% |
| 235, 236 | 6 | E. coli | | Avicel | 0.004 | 0.1 mg/ml | 48 | 7 | 37 | 0.31% |
| 263, 264 | 48 | E. coli | | Avicel | 0.004 | 0.1 mg/ml | 48 | 7 | 37 | 0.06% |
| 281, 282 | 6 | A. niger | 100 | Avicel | 0.004 | 0.1 mg/ml | 46 | 5 | 37 | 1.99% |
| 261, 262 | 5 | E. coli | <3% | Avicel | 0.004 | 0.1 mg/ml | 46 | 5 | 37 | 1.13% |
| 261, 262 | 5 | E. coli | 5.8% | Avicel | 0.004 | 0.1 mg/ml | 46 | 5 | 37 | 1.44% |
| 233, 234 | 5 | E. coli | | Avicel | 0.004 | 0.1 mg/ml | 48 | 7 | 37 | 0.18% |
| 219, 220 | 6 | E. coli | | Avicel | 0.004 | 0.1 mg/ml | 48 | 7 | 37 | 0.37% |
| 239, 240 | 6 | E. coli | | Avicel | 0.004 | 0.1 mg/ml | 48 | 5 | 55 | 0.52% |
| 217, 218 | 6 | E. coli | | Avicel | 0.004 | 0.1 mg/ml | 48 | 7 | 37 | 0.37% |
| 251, 252 | 45 | E. coli | <3% | Avicel | 0.004 | 0.1 mg/ml | 46 | 5 | 37 | 0.40% |
| 181, 182 | 6 | S. diversa | 4.3% | Avicel | 0.004 | 0.1 mg/ml | 44.5 | 7 | 37 | 0.63% |
| 181, 182 | 6 | S. diversa | 2.4% | Avicel | 0.004 | 0.1 mg/ml | 44.5 | 7 | 37 | 0.45% |
| 225, 226 | 6 | S. diversa | 4.4% | Avicel | 0.004 | 0.1 mg/ml | 44.5 | 5 | 37 | 1.21% |
| 229, 230 | 6 | S. diversa | 6.3% | Avicel | 0.004 | 0.1 mg/ml | 44.5 | 5 | 37 | 2.08% |
| 221, 222 | 6 | S. diversa | 3.3% | Avicel | 0.004 | 0.1 mg/ml | 44.5 | 5 | 55 | 1.08% |
| 223, 224 | 6 | S. diversa | 3.5% | Avicel | 0.004 | 0.1 mg/ml | 44.5 | 5 | 55 | 1.74% |
| 185, 186 | 6 | S. diversa | 7.9% | Avicel | 0.004 | 0.1 mg/ml | 44.5 | 5 | 37 | 1.34% |
| 139, 140 | 6 | S. diversa | 3.5% | Avicel | 0.004 | 0.1 mg/ml | 44.5 | 7 | 37 | 0.20% |
| 165, 166 | 6 | S. diversa | 5.5% | Avicel | 0.004 | 0.1 mg/ml | 44.5 | 5 | 55 | 0.84% |

### Exemplary Assays for the Initial Screening of Cellulases

### Exemplary Protocol for Single-Enzyme Digests (37° C. and 55° C.)

[1018] 1. Preparation. For every 10 test samples, you'll usually need: two 96-well plates (for digests@37° C. and 55° C.), two clear 384-well plates (for corresponding timepoints) and space available on a 96-deep-well plate for enzyme dilutions.
[1019] 2. Layout. Generally, 10 enzyme samples per plate plus positive and negative controls. Each sample gets 1 column. A typical screening layout is shown (certain details of this protocol are given for this layout).
   [1020] row B: 0.1 mg/mL enzyme@pH 5
   [1021] row C: 1.0 mg/mL enzyme@pH 5
   [1022] row D: 0.1 mg/mL enzyme@pH 7
   [1023] row E: 1.0 mg/mL enzyme@pH 7
   [1024] row F: 0.1 mg/mL enzyme@pH 9
   [1025] row G: 1.0 mg/mL enzyme@pH 9
[1026] 3. Make 1.2× buffered substrate solutions. The following is for digestion at final concentrations of 0.4% AVICEL®, 50 mM buffer and 5 mM sodium azide. For every 12 samples to be tested (10 test plus 2 controls), you'll need approximately 10 mL each of the following buffered solutions. Sodium azide is added to inhibit growth of any microbial contaminants during digest reactions.
   [1027] a. 0.48% dispersed AVICEL®; 60 mM sodium acetate, pH 5.0; 6 mM sodium azide
   [1028] b. 0.48% dispersed AVICEL®; 60 mM sodium phosphate, pH 7.0; 6 mM sodium azide
   [1029] c. 0.48% dispersed AVICEL®; 60 mM sodium phosphate, pH 9.0; 6 mM sodium azide
[1030] 4. Deposit 175 μL/well of 1.2× buffered substrate solutions into two 96-well plates. These will be the digest plates. Use a multichannel pipet. AVICEL® sinks rapidly, so each time you are pipetting out of the trough, pipet up and down to form an even suspension before transferring fluid to the 96-well plate. Array as shown in the layout above: pH 5 in rows B and C, pH 7 in rows D and E, pH 9 in rows F and G.
[1031] 5. Prepare two 384-well timepoint plates with 35 μL/well stop solution. Use a TITERTEK™. Fill all wells of each plate with 35 μL stop solution.
[1032] 6. Make 6× enzyme solutions. In a 96-well plate, make 0.6 mg/mL and 6 mg/mL dilutions of each enzyme stock. Make about 250 μL each of the two dilutions per sample. Dilute enzyme stocks with water and array them in two rows (upper row 0.6 mg/mL, lower row 6 mg/mL) of the plate in the order desired on the digest plates. Also include the positive and negative controls among the 12 samples.
[1033] 7. Add enzyme to substrate and immediately take a t 0 timepoint. Using a multichannel pipet, remove 35 μL of 6× enzyme samples from the upper row of the dilution plate and transfer to rows B, D, and F of both digest plates (see layout above). Carefully pipet up and down to thoroughly mix, then immediately transfer 35 μL of each digest solution to the stop solution in the upper left quadruplet of the 384-well timepoint plate. Pipet up and down to mix with the stop solution. Note that if you're careful about minimizing pipetting error, for each row on the digest plate, you can use the same 12 pipet tips for both enzyme transfer and timepoint transfer. Store the 384-well timepoint plate with robo-lid at 4° C. until the next time point.
[1034] 8. Incubate. Place one digest plate at 37° C. and the other at 55° C., using robo-lids and zip-lock bags humidified with a wet paper towel.
[1035] 9. Take another time-point 3-5 hours later. First centrifuge the digest plates to pull down moisture condensed on the lids (3200×g for <1 minute). Using a multichannel set to 35 μL, pipet up and down to evenly suspend AVICEL®, then transfer 35 μL to the upper right quadruplet of the timepoint plate and mix with stop solution. Take care to minimize pipetting error. Note the length of digest for this timepoint.
[1036] 10. Take a third timepoint at approximately 24 hours. On day 2, take a third timepoint as described above. Place in the lower left quadruplet and mix with stop solution. Note the length of digest for this timepoint.
[1037] 11. Take a final timepoint at approximately 48 hours. On day 3, remove plates from incubators. Take a final timepoint as described above and mix with the stop solution in the lower right quadruplet of the timepoint plates. Note the length of digest and write it on the lids of the 96-well digest plates. Use the timepoint plate for the BCA and glucose oxidase assays. Apply a foil seal on the digest plates and store at −20° C. for later use in CE/HPLC analysis.

### Exemplary Protocol for the Glucose Oxidase β-Glucosidase) Assay

[1038] This exemplary protocol dilutes the digestion reactions 39-fold (including the 2-fold dilution of each time point into stop solution) and therefore is appropriate when you expect the concentration of glucose equivalents in the digestion products to range between around 25 to 400 μM. Higher glucose concentrations will also be detected but will fall beyond the linear range of the standards.

[1039] The following should be done for each 384-well stopped reaction plate (e.g., timepoint plate).
[1040] 1. Make sure the APRICOT™ is set up and has the 384-well manifold attached and mounted with fresh tips.
[1041] 2. Centrifuge stopped reaction plate at 2,000×g for a minute.
[1042] 3. Add standard curves: The cellobiose (CB) standard is used to control for the β-glucosidase activity when performing the GO assay. When the β-gluc step is correctly carried out, the CB standard, as expressed in glucose equivalents, should give the same slope as the glucose standard.
   [1043] a. It's convenient to make the dilutions in a 96-deep-well plate so that they will be arrayed as desired for transfer to the assay plates.
   [1044] b. Standards can be diluted in water.
   [1045] c. Make a 200 μM CB solution and a 400 μM glucose solution. Perform 4 successive 2-fold dilutions of each. With the inclusion of a 0 μM solution, you'll have a 6-point standard curve for both glucose and CB.
   [1046] d. An exemplary protocol:
      [1047] i. In one well of a 96-deep-well plate, make 1 mL of a 200 μM CB solution. In another well, make 1 mL of a 400 μM glucose solution.
      [1048] ii. Add 0.5 mL water to each of 5 wells adjacent to each standard in order to make successive dilutions.
      [1049] iii. Make 4 successive 2⁻¹ dilutions for each standard (0.5 mL+0.5 mL water). Remember to leave the final well without the standard as the “0 μM” point.
   [1050] e. Transfer 35 μL/well of each dilution to the 35 μL stop solution to unused areas of the timepoint plate like rows A, B, O and P. Load each standard in quadruplicate.
[1051] 4. Using a TITERTEK™ MULTIDROP™, load 35 μL/well of freshly made β-glucosidase Solution into a black 384-well plate.
[1052] 5. Using the APRICOT™, transfer 4 μL/well from the timepoint plate to the β-glucosidase plate and mix; (an exemplary Apricot program for these transfer steps is called DYCAICO7™). Once mixed, the final pH should be around 7.5. Store the timepoint plate at −20° C. with foil seal in case either assay needs repeating.
[1053] 6. Centrifuge plate 2000×g for a few seconds to eliminate air bubbles.
[1054] 7. Incubate the β-glucosidase plates at room temperature for 2-3 hours.
[1055] 8. Use a TITERTEK MULTIDROP™ to add 40 μL/well of freshly-made 2× GO Assay Solution to the black β-glucosidase-treated plate. (Make this solution immediately before you plan to use it.)
[1056] 9. Incubate the assay plate at room temperature, protected from light, for 30 minutes. (If necessary, centrifuge plate 2000×g for a few seconds to eliminate air bubbles.)
[1057] 10. Read fluorescence at 530/595 nm for resorufin detection.
[1058] 11. Save data as a text file for analysis using Excel template.

### Exemplary Protocol for the BCA Assay

[1059] 1. Preheat BEAVER™ (Tansun Limited, UK) heater: bottom=70° C., top=75° C.
[1060] 2. Make sure the APRICOT™ is set up and has the 384-well manifold attached. Run the program several times to get the washer fully primed.
[1061] 3. Standards: Add standards to the timepoint plate as described for the GO assay. Note that in the past, I used 0.1 mg/mL protein solution (like BSA) for diluting the standards in order to mimic the protein background present in the test samples in the BCA assay. This is only relevant when using high levels of relatively impure protein in the digests.
[1062] 4. Centrifuge timepoint plate at 3200×g for 5 minutes at 4° C. to pellet AVICEL® present in the samples.
[1063] 5. For each timepoint plate, use two new clear 384-well plates for BCA assay (duplicate plates). So you'll need 4 plates total to cover both 37° and 55° timepoints.
[1064] 6. Using a TITERTEK MULTIDROP™, add 15 μL/well of freshly combined A+B solution to each assay plate.
[1065] 7. Using the APRICOT™, transfer 15 μL enzyme digest supernatant from the timepoint plate to the assay plate in duplicate. Avoid transferring AVICEL® (suspended AVICEL® will cause background). Make sure there is a mixing step on the APRICOT™. Since there is space for only two plates on the BEAVER™ heater, you should stagger the 37° and 55° timepoint assays by about 40 minutes.
[1066] 8. Immediately apply foam lids to assay plates and place in the BEAVER™ heater.
[1067] 9. Incubate for exactly 35 minutes.
[1068] 10. Once incubation is complete, immediately place plates on ice, replace foam lids with original lids, and quickly head toward the centrifuge.
[1069] 11. Centrifuge 3200×g for 5 minutes at 4° C. This centrifugation at 4° C. will rapidly cool the plates.
[1070] 12. Read absorbance at 562 nm.
[1071] 13. Save data as a text file for analysis using EXCEL™ template.

### Solutions:

### 13% Dispersed AVICEL®

[1072] Measure 130 grams AVICEL® microcrystalline cellulose (FMC Biopolymer: type PH 105, grade NF/EP) into a clean, high-speed blender and add 18 MΩ dI water to the 1 L measuring line (about 916 mL). Close the lid and blend at highest speed for 20 minutes. Transfer the suspension to an autoclave-safe container and autoclave using the 30 minute “liquid” cycle. Store at room temperature.

### Stop Solution

[1073] (400 mM carbonate buffer, pH 10)

[1074] Follow directions below for BCA Solution A but do not add the BCA component. Then dilute 2-fold to produce 1 liter of 400 mM carbonate solution.

### BCA Solution A

[1075] (5 mM BCA in 800 mM carbonate pH 10)

| | | | final |
|---|---|---|---|
| | FW | amt | concentration |
| sodium carbonate, | 124.00 | 64 mg/mL | 516 mM |
| monohydrate* | | | |
| sodium bicarbonate | 84.01 | 24 mg/mL | 286 mM |
| bicinchoninic acid disodium | 388.28 | 1.95 mg/mL | 5 mM |
| salt hydrate (Sigma D8284) | | | |

[1076] 1. In a 500 mL beaker with stir bar, combine 32 grams sodium carbonate monohydrate* with 12 grams sodium bicarbonate.
[1077] 2. Add 18 MΩ water to about 450 mL and place on a magnetic stirrer until completely dissolved (about 15-30 minutes).
[1078] 3. Add 975 mg BCA reagent and continue stirring until completely dissolved.
[1079] 4. Adjust volume to 500 mL with 18 MΩ water.
[1080] 5. Sterile filter.
[1081] 6. Store at 4 ° C. Make fresh every 2-3 weeks.
   [1082] Alternatively, use 27.35 grams of anhydrous sodium carbonate (FW 106) in step 1 above.

### BCA Solution B

| | FW | amt | final concentration |
|---|---|---|---|
| cupric sulfate pentahydrate | 249.69 | 1.24 mg/mL | 5 mM |
| (Sigma C2857) | | | |
| L-serine | 105.09 | 1.26 mg/mL | 12 mM |

[1084] 1. In a 500 mL beaker with stir bar, combine 620 mg cupric sulfate pentahydrate with 630 mg L-serine.
[1085] 2. Add 18 MΩ water to about 450 mL and place on a magnetic stirrer until completely dissolved (about 15-30 minutes).
[1086] 3. Adjust volume to 500 mL with 18 MΩ water.
[1087] 4. Sterile filter.
[1088] 5. Store at 4 ° C. Make fresh every 2-3 weeks.

### ≈-Glucosidase Solution

| Component | [Stock] | [final] |
|---|---|---|
| Sterile dI water | n/a | qs |
| Na Phosphate Buffer, pH 7.0* | 500 mM | 125 mM |
| SEQ ID NO: 424** β-glucosidase | variable | 0.04 U/mL |

*Once the high-pH solution from the timepoint plate is diluted 10-fold into β-glucosidase solution, the final pH should be around 7.5, which is appropriate for SEQ ID NO: 424.
**A His-tagged version of this enzyme can also be used.

### 2× GO Assay Solution

| Component | [Stock] | | 2x Cocktail | |
|---|---|---|---|---|
| Sterile dI water | n/a | | qs | |
| Na Phosphate Buffer, pH 7.4 | 500 | mM | 100 | mM |
| GO/HRP mix | 2500/250 | U/mL | 2/0.2 | U/mL |
| Amplex Red | 50 | mM | 0.1 | mM |

[1091] Add components in the order listed, then use immediately in the assay.

### GO/HRP Mix

[1092] Glucose oxidase: Sigma #G7141-50KU. Dissolve all 50,000 units in 5 mL 50 mM phosphate, pH 7.4 buffer.
[1093] Horseradish peroxidase: Sigma #P2088-5KU. Dissolve all 5,000 units in 5 mL 50 mM phosphate, pH 7.4 buffer.

[1094] Combine Glucose oxidase and HRP solutions. Use a sterile syringe to add an equal volume (10 mL) of sterile glycerol. Mix well. This gives 20 mL of solution with final concentrations: 2,500 U/mL GO; 250 U/mL HRP. Aliquot into 1-mL tubes and store at −20° C.

### 50 mM Amplex Red

[1095] Molecular Probes #A22177 (10×10-mg vials; MW=257.25). Dissolve each 10 mg vial in 0.777 mL DMSO to produce a 50 mM stock. Store at −20° C. protected from light.

[1096] Optional 10 mM stock: Invitrogen #A12222; MW=257.25. Dissolve all 5 mg in 1.94 mL DMSO. Aliquot 250 μL per 0.5-mL tube and freeze at −20° C. protected from light.

### Sodium Azide

[1097] Sigma #S2002 (FW 65.01); Be careful; it's toxic and carcinogenic. Make concentrated stocks in water (e.g., 1 M). For use as an antimicrobial additive, typical concentrations are 0.02-0.05% (w/v), which is between 3 and 8 mM.

### Exemplary Enzyme Digestibility Assay-Large Scale

[1098] Large scale enzyme digestibility assays can also be used to identify an enzyme of the invention, and to characterize an enzyme of the invention. An exemplary large scale enzyme digestibility assay is:

[1099] The exemplary large scale enzyme digestibility assay was carried out in a 10 mL glass crimp-top vial. The moisture content and the sugar composition were determined before the assay. 250 dw mg±10 mg of shredded bagasse was weighed into the glass vial and certain amount of 100 mM NaOAc buffer was added depending on the final enzyme concentration. The NaOAc buffer had pH of 5.0, and it contained 10 mM of NaN₃ as a growth inhibitor. The bagasse mixture was capped without sealing and preheated in a 37° C. incubator for about 20 min before adding the proper amount of enzyme solution. The enzyme loading in the large scale reaction is 25 mg of total protein/g of cellulose. The total reaction volume is 5 mL. Once the enzyme solution was added, the vials were sealed and clamped to the rotary. About 200 uL of sample was drawn at 2, 4, 6 and 24 hr. The sample was centrifuged at 13,200 rpm for 5 min. The supernatant was diluted 4 folds into a 384-well plate. The sugar composition in the reaction product was analyzed with RI-HPLC against known standards and cellulose conversion was calculated based on the theoretical cellulose value in the bagasse.

### Example 6

### Identification and Characterization of Enzymes of the Invention

[1100] This example describes exemplary strategies for identifying and characterizing enzymes of the invention, which include enzymes to be used in the mixtures (“cocktails”) of enzymes of the invention designed to efficiently process (“hydrolyze”) the complex structures of various biomass, e.g., sugarcane plant fibers (also called “bagasse”), which require multiple enzyme activities to completely degrade (“hydrolyze”) of the bagasse.

[1101] In alternative aspects, different combinations of enzymes are tested to determine the optimum combination necessary to hydrolyze a bagasse substrate (or any other target biomass substrate) to a desired level. Categorization of enzymes can be based on their previously determined activity on model substrates, and not necessarily their sequence identity (sequence similarity to/ homology to) known enzymes. For example, an enzyme that releases cellobiose from cellulose will be considered a cellobiohydrolase even if by sequence it is most similar to an endoglucanase.

### Enzyme Discovery:

[1102] Prokaryotic Enzymes:

[1103] Many of known enzymes have been discovered from prokaryotic libraries by functional screening on unlabeled or labeled substrates, e.g., unlabeled or labeled AVICEL™. Functional screening can also comprise the use of any assay or protocol, e.g., xylan traps, and the like. Gene libraries from environmental-derived samples, including soil, air or water samples, e.g., from agricultural fields, such as sugarcane fields, and including any microorganism found in any environmental-derived sample, either directly or indirectly: e.g., plant (e.g., sugarcane, corn) microorganisms; insect-associated (e.g., termite gut) microorganisms; animal-associated (e.g., ruminant gut) microorganisms; and the like, are used to express polypeptides, which in turn are screened for a lignocellulosic activity, e.g., a glycosyl hydrolase, cellulase, endoglucanase, cellobiohydrolase and/or β-glucosidase (beta-glucosidase) activity, which includes for example bagasse-degrading or corn fiber- (e.g., corn seed fiber)-degrading activity.

[1104] Fungal Enzymes:

[1105] Functional screening will include fungal libraries in addition to bacterial libraries; enzymes having a lignocellulosic activity—including a biomass-degrading, e.g., a bagasse-degrading or corn seed fiber-degrading, activity will be identified from fungal sources (many of the best performing biomass-degrading enzymes have been identified from fungi, so this may represent a good source for bagasse specific fibrolytic enzymes).

[1106] Fungi that efficiently degrade bagasse presumably have repertoire of enzymes that have evolved to work well together. It is possible that multiple bagasse-degrading enzymes from the same organism synergize in a bagasse degrading application when compared to enzymes isolated from different organisms. For these reasons, this exemplary enzyme discovery strategy of this invention focuses on fungal genes.

[1107] In one embodiment, the discovery of fungal bagasse degrading enzymes utilizes Verenium Corporation's High Throughput Culturing technology to isolate and array unique microbes from environmental samples. A combination of approaches can be evaluated to identify the enzymes secreted by fungi as they are actively degrading and growing on a biomass substrate, e.g., a bagasse or corn fiber (e.g., corn seed fiber) substrate. In one embodiment, isolating most or all of the fibrolytic enzymes from a highly active fungus provides an effective combination of enzymes that synergize well together when heterologously expressed in plants or microbes.

[1108] Substrate Pretreatment:

[1109] Initially, simple bench scale pretreatments of the biomass substrate, e.g., bagasse or corn fiber substrate, is performed and evaluated.

[1110] Exemplary Enzyme Evaluations in Application Assays

[1111] In one embodiment, an application assay will be used to determine the activity of enzymes and enzyme combinations on untreated and pretreated biomass substrate, e.g., bagasse or corn fiber (e.g., corn seed fiber) substrate. This can involve utilizing analytical techniques to quantitate and identify the sugars released from the biomass substrate. The methods established to determine the exact sugar composition of the fiber substrate also can be applied on the biomass (e.g., bagasse or corn fiber) sample. This information can be used to determine the extent of degradation of the substrate after enzyme treatment.

[1112] The best combination of enzymes will be systematically determined. This strategy can include fixing the identity of one or more enzymes or pretreating the substrate. Benchmark enzymes (commercial preparations and/or subclones of existing fibrolytic enzymes) can be used to develop and validate this assay.

[1113] For enzymes like CBH and beta-glucosidases, which are severely inhibited by cellobiose and glucose respectively, product inhibition may be measured.

[1114] A. Enzyme Discovery
[1115] a. Exemplary functional screening strategies for prokaryotic enzymes
   [1116] Using functional assays, prokaryotic gene libraries from relevant sample site(s) (e.g., corn or sugarcane fields) are screened for target enzyme activities (e.g., glycosyl hydrolases, etc.).
   [1117] Enzyme screens with different fluorophore (e.g. 4-Methyl-umbelliferyl and Resorufin-linked substrates) can be multiplexed to screen for multiple enzyme activities at the same time.
[1118] b. Exemplary screening strategies for fungal strains.
   [1119] Screen novel fungi from High Throughput Culturing, and top fungal strains identified during the corn seed fiber project for strains that degrade target biomass (e.g., corn fiber or bagasse) in vivo effectively.
   [1120] The identity and diversity of the identified strains can be determined by conducting an 18S analysis.
   [1121] Generate full-length cDNA expression libraries from cultures actively producing biomass-degrading (e.g., bagasse-degrading) enzymes.
   [1122] Screening efforts can be applied to clone most or all of the genes present in the culture media from these strains—particular if they are actively degrading the target biomass (e.g., corn fiber or bagasse). Exemplary approaches that can be used to clone all these genes may involve a combination of the following methods:
      [1123] 1. Screen cDNA libraries by (a) a sequence based approach, and/or, (b) screened gDNA libraries by substrate-binding domain (SBD), put genomic clones directly in Aspergillus, intron splicing done by the host in process of creating cDNA versions to confirm spliced clones;
      [1124] 2. Proteomic analysis to identify proteins secreted into the culture media when these strains are growing on the target biomass (e.g., corn fiber or bagasse) substrate.

[1125] B. Exemplary Enzyme Characterizations
[1126] a. Bioinformatic characterization of newly discovered genes
   [1127] Domain structure, enzyme class and family
   [1128] Signal sequences, rare codons, etc
[1129] b. Subclone newly discovered genes and optimize protein expression for characterization and application testing.
[1130] c. Enzyme characterization of all subclones with a standard protocol
   [1131] specific activity for selected, or all, enzyme preparations can be determined on a model substrate; this information can be used for calculating enzyme loading in applications assays.

[1132] C. Exemplary Enzyme Evaluations in Application Assays
[1133] a. Alternative Assay Development strategies:
   [1134] Distribution of target biomass (e.g., corn fiber or bagasse) substrate;
   [1135] Reaction format conditions;
   [1136] Medium throughput assay to determine total sugar released (e.g., a reducing sugar assay);
   [1137] Detailed analysis (HPLC/ELSD, LC/MS, etc) can be performed on samples with high levels of sugar release; methods to quantitate and identify the sugars released and what remains undigested can be applied. In one embodiment: quantitate the sugar composition of the fiber substrate in order to evaluate enzyme performance as a % sugar released;
   [1138] Exemplary strategy for combinatorial evaluation of enzymes: may include enzymatic or chemical pretreatment for early studies on specific enzyme classes.
[1139] b. Validation of assay with benchmark enzymes: this will give some target performance criteria and information on units of enzyme to add in application assay.
[1140] c. Evaluation of all enzymes in application assay: identify enzymes and enzyme combinations that result in the most sugar release from the target biomass (e.g., corn fiber or bagasse) substrate.

[1141] D. Evaluation of Enzymes in Plant Cells—Transgenic Plants

[1142] In one embodiment, promising candidates in each hydrolytic class are subjected to plant expression, including both in host plant cells, plant tissues and/or transgenic plants. These plant-expressed enzymes (e.g., hydrolases) will be tested in target biomass (e.g., corn fiber or bagasse) applications assays.

[1143] E. Evolution—Optimization of Enzyme Activity

[1144] In one embodiment, and depending on enzyme performance, some or all of the enzymes are “optimized”, i.e., are sequence-modified to improve parameters such as enzyme productivity on a given substrate, temperate optimum, pH optimum, stability, specific activity, product inhibition, etc. Optimization may involve evolution using Verenium Corporation's proprietary GENE SITE SATURATION MUTAGENESIS (or GSSM) and/or GENEREASSEMBLY™ technologies.

### Example 7

### Multidomain Enzymes of This Invention

[1145] This example describes inter alia the designing and making of multi-domain polypeptides (e.g., enzymes) (and the nucleic acids that encode them) of this invention.

[1146] The invention provides lignocellulosic enzymes, e.g., a glycosyl hydrolase, cellulase, endoglucanase, cellobiohydrolase, beta-glucosidase, xylanase, mannanse, β-xylosidase and/or arabinofuranosidase enzymes, that are multidomain enzymes comprising at least one (e.g., can include multiple) carbohydrate binding module(s), which can be a heterologous or homologous carbohydrate binding module (CBM), and can be any known CBM module, e.g., a cellulose binding module, a lignin binding module, a xylose binding module, a mannanse binding module, a xyloglucan-specific module, an arabinofuranosidase binding module, etc., from another lignocellulosic enzyme. This example described exemplary protocols for the routine identification of carbohydrate binding modules, e.g., cellulose binding modules.

### CBM Binding Assay Materials:

[1147] The substrates for an exemplary CBM binding assay (for cellulose and xylan) are AVICEL® microcrystalline cellulose (MCC) and Oat-Spelt Xylan (Sigma, X-0627). Cellulose binding modules are either purified CBM-GST fusion proteins or the lysates containing CBMs. BSA was chosen as control along the assays.

### CBM Binding Assay Protocol:

[1148] CBM binding assays were done in 1.5 ml Eppendorf tubes with total 200 ul of reaction volume in which contained 1 mg of substrates (Avicel MCC or Oat_Spet-Xylan) and 0.1mg of CBM in 50 mM TisHCl buffer (pH 8.0). After the reactions were done at room temperature for 1 h, the unbound CBMs remaining in the supernatants were separated from the bound CBMs remaining in the pellets by centrifugation at 10,000 rpm for 5 min. Next, washed the pellets for three times with same buffer, added SDS loading buffer and boiled for 10min to release the bound CBMs from the pellets. Finally, the bound and unbound CBMs were detected by SDS PAGE.

### CBM Definition:

[1149] As noted above, any carbohydrate binding modules (CBM), e.g., cellulose binding module, can be incorporated into an enzyme of this invention, and many such modules are well known in the art, for example, in a Carbohydrate Active Enzymes website a carbohydrate-binding module is defined as contiguous amino acid sequence within a carbohydrate-active enzyme with a discreet fold having carbohydrate-binding activity. A few exceptions are CBMs in cellulosomal scaffolding proteins and rare instances of independent putative CBMs. The requirement of carbohydrate binding modules, e.g., cellulose binding modules, existing as modules within larger enzymes sets this class of carbohydrate-binding protein apart from other non-catalytic sugar binding proteins such as lectins and sugar transport proteins.

[1150] CBMs were previously classified as cellulose-binding domains based on the initial discovery of several modules that bound cellulose. However, additional modules in carbohydrate-active enzymes are continually being found that bind carbohydrates other than cellulose yet otherwise meet the CBM criteria, hence the need to reclassify these polypeptides using more inclusive terminology. Previous classification of cellulose-binding domains were based on amino acid similarity. Groupings of CBDs were called “Types” and numbered with roman numerals (e.g. Type I or Type II CBDs).

[1151] In keeping with the glycoside hydrolase classification, these groupings are now called families and numbered with Arabic numerals, as noted below. In alternative embodiment, enzymes of the invention include one or multiple members of any or all of these carbohydrate binding modules, e.g., cellulose binding modules, as domains linked to, e.g., as sequences spliced into or added onto, any enzyme or peptide of the invention:

[1152] CBM_{—}1:

[1153] Modules of approx. 40 residues found almost exclusively in fungi. The cellulose-binding function has been demonstrated in many cases, and appears to be mediated by three aromatic residues separated by about 10.4 angstrom and which form a flat surface. The only non-fungal occurrence of CBM1 is in an algal non-hydrolytic polysaccharide-binding protein which is composed of four repeated CBM1 modules. Binding to chitin has been demonstrated in one case.

[1154] CBM_{—}2 (CBM_{—}2a, CBM_{—}2b)

[1155] Modules of approx. 100 residues and which are found in a large number of bacterial enzymes. The cellulose-binding function has been demonstrated in many cases. Several of these modules have been shown to also bind chitin or xylan.

[1156] CBM_{—}3 (CBM_{—}3a, CBM_{—}3b, CBM_{—}3c)

[1157] 150 residues found in bacterial enzymes. The cellulose-binding function has been demonstrated in many cases. In one instance binding to chitin has been reported.

[1158] CBM_{—}5_{—}12:

[1159] approx. 40-60 residues. The majority of these modules is found among chitinases where the function is chitin-binding. Distantly related to the CBM5 family.

[1160] CBM_{—}10:

[1161] Modules of approx. 50 residues. The cellulose-binding function has been demonstrated in one case.

[1162] Results of these carbohydrate binding module (CBM) assay determinations are shown in Table 5 and Table 6, below. These results, as summarized in Tables 5 and 6, demonstrate the presence of functional CBMs in some of the exemplary polypeptides of the invention. The tables also indicate activity associated with these CBMs of the invention.

[1163] The invention provides chimeric polypeptides, including enzymes, comprising polypeptide sequences of the invention (e.g., the enzymes of the invention, including enzymatically active subsequences (fragments) of polypeptides of the invention), including any combination of CBMs, including the exemplary CBMs noted below. For example, a chimeric polypeptide of the invention having lignocellulosic activity, e.g., a glycosyl transferase, a cellulase, a cellulolytic activity, an endoglucanase, a cellobiohydrolase, a beta-glucosidase, a xylanase, a mannanse, a β-xylosidase or an arabinofuranosidase activity, can comprise one, two or several heterologous, or endogenously rearranged, CBMs; and these heterologous or endogenously rearranged CBMs can be positioned internal to the sequence, and/or amino terminal or carboxy terminal to an amino acid sequence; if the chimeric polypeptide of the invention is a recombinant protein, then the chimeric polypeptide can be made by constructing a recombinant chimeric coding sequence encoding the flanking and/or internal heterologous or endogenously rearranged CBMs coding sequences; and these chimeric nucleic acid coding sequences are also sequences of the invention.

TABLE 5
CBM in trans Subclones

| | | CBM | CBM | | |
|---|---|---|---|---|---|
| | | Binding | Binding to | | |
| CBM | Parental clone (which includes | to Avicel | Oat-Spelt | Family/Other Domains Included in | Comments for |
| family | indicated CBM) | MCC | Xylan | clone | ORF Subclone |
| 2a | SEQ ID NO: 468 (encoded by, | .+ | .+? | Glycosyl Hydrolase family 8 + 2CBM2 | signal removed |
| | e.g., SEQ ID NO: 467) | | | | |
| 2a | SEQ ID NO: 468 (encoded by, | .+ | .− | Glycosyl Hydrolase family 8 + 2CBM2 | signal removed |
| | e.g., SEQ ID NO: 467) | | | | |
| 2a | SEQ ID NO: 470 (encoded by, | .+ | .− | CBM2 + Cellulase | signal removed |
| | e.g., SEQ ID NO: 469) | | | | |
| 2a | SEQ ID NO: 6 (encoded by, | .+ | .− | Glycosyl Hydrolase family 6 + CBM2 | none/change start |
| | e.g., SEQ ID NO: 5) | | | | |
| 2a | SEQ ID NO: 464 (encoded by, | .++ | .+? | CBM2 + CBM10 + Cellulase | signal removed |
| | e.g., SEQ ID NO: 463) | | | | |
| 3b | SEQ ID NO: 438 (encoded by, | .+ | .− | CBM3-Fn3-CBM5 | None |
| | e.g., SEQ ID NO: 437) | | | | |
| 3b | SEQ ID NO: 94 (encoded by, | .+ | .−? | F. 48-DUF-CBM3 | leader removed |
| | e.g., SEQ ID NO: 93) | | | | |
| 3b | SEQ ID NO: 176 (encoded by, | .+ | .− | F.48-CBM3 | None |
| | e.g., SEQ ID NO: 175) | | | | |
| 10 | SEQ ID NO: 12 (encoded by, | .+ | .− | Cellulase + CBM5, 10 + F6 | remove leader |
| | e.g., SEQ ID NO: 11) | | | | |
| 10 | SEQ ID NO: 464 (encoded by, | .+ | .− | CBM2 + CBM10 + Cellulase | signal removed |
| | e.g., SEQ ID NO: 463) | | | | |
| 17_28 | SEQ ID NO: 8 (encoded by, | .+ | .+ | F5 + 2CBM_17_28 | None |
| | e.g., SEQ ID NO: 7) | | | | |
| 17_28 | SEQ ID NO: 10 (encoded by, | .+ | .+ | F5 + CBM17 + 3SLH | Signal Removed |
| | e.g., SEQ ID NO: 9) | | | | |
| 17_28 | SEQ ID NO: 430 (encoded by, | .+ | .+ | F5 + CBM17 + 3SLH | None |
| | e.g., SEQ ID NO: 429) | | | | |
| 3b or | SEQ ID NO: 448 (encoded by, | .++ | .+ | Cellulase + CBM3 | |
| 3c | e.g., SEQ ID NO: 447) | | | | |
| 3b or | SEQ ID NO: 466 (encoded by, | .++ | .+ | Cellulase + CBM3 | |
| 3c | e.g., SEQ ID NO: 465) | | | | |
| 3b or | SEQ ID NO: 2 (encoded by, | .+ | .++ | Cellulase + Glycosyl Hydrolase family | |
| 3c | e.g., SEQ ID NO: 1) | | | 6 + CBM3 | |
| 3b or | SEQ ID NO: 428 (encoded by, | .+ | .+ | Big_2 + Glycosyl Hydrolase family | |
| 3c | e.g., SEQ ID NO: 427) | | | 9 + CBM3 | |
| 3b or | SEQ ID NO: 446 (encoded by, | .− | .+ | Glycosyl Hydrolase family 9 + CBM3 | |
| 3c | e.g., SEQ ID NO: 445) | | | | |
| 3b or | SEQ ID NO: 440 (encoded by, | .− | .−? | Glycosyl Hydrolase family 10 + CBM3 | |
| 3c | e.g., SEQ ID NO: 439) | | | | |
| 3b or | SEQ ID NO: 448 (encoded by, | .− | .−? | Cellulase + CBM3 | |
| 3c | e.g., SEQ ID NO: 447) | | | | |
| 4_9 | SEQ ID NO: 462 (encoded by, | .− | .+? | Glycosyl Hydrolase family | |
| | e.g., SEQ ID NO: 461) | | | 16 + CBM4_9 | |
| 4_9 | SEQ ID NO: 436 (encoded by, | .− | .+ | Glycosyl Hydrolase family | |
| | e.g., SEQ ID NO: 435) | | | 16 + 2CBM4_9 | |
| 4_9 | SEQ ID NO: 436 (encoded by, | .− | .+ | Glycosyl Hydrolase family | |
| | e.g., SEQ ID NO: 435) | | | 16 + 2CBM4_9 | |
| 4_9 | SEQ ID NO: 442 (encoded by, | .−? | .+? | DUF1083 + Glycosyl Hydrolase family | |
| | e.g., SEQ ID NO: 441) | | | 10 + He_PIG + CBM4_9 | |
| 4_9 | SEQ ID NO: 444 (encoded by, | .− | .+ | Dockerin_1 + Esterase | |
| | e.g., SEQ ID NO: 443) | | | GH10 + CBM4_9 | |
| 4_9 | SEQ ID NO: 432 (encoded by, | .− | .+ | Glycosyl Hydrolase family | |
| | e.g., SEQ ID NO: 431) | | | 11 + CBM4_9 | |
| 4_9 | SEQ ID NO: 434 (encoded by, | .− | .−? | Glycosyl Hydrolase family | |
| | e.g., SEQ ID NO: 433) | | | 10 + CBM4_9 | |
| 5_12 | SEQ ID NO: 438 (encoded by, | .− | .−? | 2Fn3, CBM_5_12 | |
| | e.g., SEQ ID NO: 437) | | | | |
| 5_12 | SEQ ID NO: 452 (encoded by, | .− | .−? | Glycosyl Hydrolase family | |
| | e.g., SEQ ID NO: 451) | | | 19 + PKD + CBM5_12 | |
| 6 | SEQ ID NO: 454 (encoded by, | .− | .−? | Glycosyl Hydrolase family 45 + CBM6 | |
| | e.g., SEQ ID NO: 453) | | | | |

TABLE 6
Non-Glycosyl Hydrolase (GH)-associated CBMs

| Amino Acid SEQ ID NO: | | | CBM Binding to | CBM Binding to Oat- |
|---|---|---|---|---|
| (encoded by SEQ ID NO:) | Domains Included | Comments | Avicel MCC | Spelt Xylan |
| SEQ ID NO: 450 (encoded by, | CBM_33 + CBM_2 | signal removed | .+ | .− |
| e.g., SEQ ID NO: 449) | | | | |
| SEQ ID NO: 472 (encoded by, | CBM_33 + CBM_2 | none | .+ | .− |
| e.g., SEQ ID NO: 471) | | | | |
| SEQ ID NO: 438 (encoded by, | CBM_5_12 + 2Fn3 + | none | .+ | .− |
| e.g., SEQ ID NO: 437) | CBM_3 | | | |
| SEQ ID NO: 458 (encoded by, | CBM_33 + Fn3 + | signal removed | .+ | .−? |
| e.g., SEQ ID NO: 457) | CBM_2a | | | |
| SEQ ID NO: 456 (encoded by, | CBM_2a | none | .+ | .−? |
| e.g., SEQ ID NO: 455) | | | | |
| SEQ ID NO: 266 (encoded by, | Fn3 homolog | leader removed | .−? | .−? |
| e.g., SEQ ID NO: 265) | | | | |
| SEQ ID NO: 460 (encoded by, | CBM_33 (CBP21 | native | .−? | .−? |
| e.g., SEQ ID NO: 459) | homolog) | | | |

### Example 8

### Monocot and Dicot Optimized Genes of this Invention

[1164] This example describes, inter alia, the design and making of nucleic acid sequences of the invention designed, or “optimized”, for optimal expression in a dicot and/or a monocot cell and/or plant.

[1165] Dicot and monocot plant synthetic genes were designed using the backtranslation program in Vector NTI 9.0™. Four protein sequences were back-translated into monocot optimized and dicot optimized coding sequences using the preferred codons for monocots or dicots. Additional sequence was added to the 5′ and 3′ end of each cellulase gene coding sequence for cloning and differential targeting to subcellular compartments. These sequences included a BamHI cloning site, Kozak sequence, and N-terminal signal sequence at the 5′ end. Vacuolar or ER targeting sequences, and a SacI cloning site was added at the 3′ end. Silent mutations were introduced to remove any restriction sites which interfered with cloning strategies. Synthetic genes were synthesized by GENEART™ (Germany).

[1166] The dicot optimized gene encoding the exemplary SEQ ID NO:360 (a CBH1 protein) is SEQ ID NO:480; the dicot optimized gene encoding the exemplary SEQ ID NO:358 (a CBH2 protein) is SEQ ID NO:481; the dicot optimized gene encoding the exemplary SEQ ID NO:168 (an endoglucanase) is SEQ ID NO:482; and, the dicot optimized gene encoding the exemplary SEQ ID NO:34 (a CBH1 protein) is SEQ ID NO:487. The monocot optimized gene encoding the exemplary SEQ ID NO:360 is SEQ ID NO:483; the monocot optimized gene encoding the exemplary SEQ ID NO:358 is SEQ ID NO:484; the monocot optimized gene encoding the exemplary SEQ ID NO:168 is SEQ ID NO:485; and the monocot optimized gene encoding the exemplary SEQ ID NO:34 is SEQ ID NO:486.

### Example 9

### Construction of Plant Expression Vectors

[1167] The invention provides various plant expression systems, including vectors, recombinant viruses, artificial chromosomes and the like, comprising nucleic acids of this invention, including nucleic acids encoding enzymes of this invention, and including sequences complementary to the enzyme-encoding sequences; and this example describes making some of these embodiments.

[1168] Expression vectors capable of directing the expression of cellulases in transgenic plants were designed for both monocot and dicot optimized cellulases. Tobacco expression vectors used the constitutive promoter Cestrum yellow leaf curl virus (CYLCV) promoter plus leader sequence (SEQ ID NO:488) to drive expression of the dicot optimized cellulase genes. Tobacco expressed cellulases were targeted to the endoplasmic reticulum (ER) via fusion to the Glycine max glycinin GY1 signal sequence (SEQ ID NO:473) and the ER retention sequence (SEQ ID NO:474). Tobacco expressed cellulases were targeted to the vacuole via fusion of the cellulase gene with the sporamin vacuolar targeting sequence (SEQ ID NO:475) at the C-terminus (Plant Phys 1997: 114, 863-870) and the GY1 signal sequence at the N-terminus. Plastid targeting of the cellulase was via the transit peptide (SEQ ID NO:476) from ferredoxin-NADP+ reductase (FNR) of Cyanophora paradoxa fused to the N-terminus (FEBS Letters 1996: 381, 153-155).

[1169] The Glycine max glycinin GY1 promoter and signal sequence (GenBank Accession X15121) was used to drive soybean seed specific expression of cellulases. Targeting of the cellulase in soybean involved either the C-terminal addition of ER retention sequence (SEQ ID NO:474) or protein storage vacuole (PSV) sequence, (SEQ ID NO:477), from β-conglycinin (Plant Phys 2004:134, 625-639).

[1170] The maize PepC promoter (The Plant Journal 1994: 6(3), 311-319) was used to drive maize leaf specific expression of each monocot optimized cellulase. The cellulase gene was fused to the gamma zein 27 kD signal sequence (SEQ ID NO:478) at the N-terminus to target through the ER and fused to the vacuole sequence domain (VSD) from barley polyamine oxidase (SEQ ID NO:479) to direct the cellulase into the leaf vacuole (Plant Phys 2004: 134, 625-639). Alternatively the ER retention sequence (SEQ ID NO:474) was used in place of the VSD to retain the cellulase in the ER. Plastid targeted constructs contained the FNR transit peptide described above. Each of the maize optimized cellulases was cloned behind the rice glutelin promoter for expression in the endosperm of the maize seed. As described above, additional sequences were added for targeting of the protein to the ER or the endosperm. Vector component information is shown in Table 7. All expression cassettes were subcloned into a binary vector for transformation into tobacco, soybean, and maize using recombinant DNA techniques that are known in the art.

### Table 7. Plant Expression Vectors Used for Transgenic Tobacco, Maize, and Soybean Event Production.

[1171] The invention provides various plant expression systems, including vectors, recombinant viruses, artificial chromosomes and the like, comprising nucleic acids of this invention, including nucleic acids encoding enzymes of this invention, and including sequences complementary to the enzyme-encoding sequences, for use in various specific plants, including tobacco, maize (corn) and/or soybean; and this example describes making some of these embodiments.

| | | | Subcellular | Construct |
|---|---|---|---|---|
| Crop | Enzyme (Enzyme Class) | Promoter | Targeting | number |
| tobacco | SEQ ID NO: 360 (encoded by SEQ ID | Constitutive | Vacuolar | 15935 |
| | NO: 480) (CBH1) | (CYLCV) | | |
| tobacco | SEQ ID NO: 360 (encoded by SEQ ID | Constitutive | ER | 15936 |
| | NO: 480) (CBH1) | (CYLCV) | | |
| tobacco | SEQ ID NO: 360 (encoded by SEQ ID | Constitutive | Plastid | 17024 |
| | NO: 480) (CBH1) | (CYLCV) | | |
| tobacco | SEQ ID NO: 358 (encoded by SEQ ID | Constitutive | ER | 17022 |
| | NO: 481) (CBH2) | (CYLCV) | | |
| tobacco | SEQ ID NO: 358 (encoded by SEQ ID | Constitutive | Vacuolar | 17023 |
| | NO: 481) (CBH2) | (CYLCV) | | |
| tobacco | SEQ ID NO: 358 (encoded by SEQ ID | Constitutive | Plastid | 17034 |
| | NO: 481) (CBH2) | (CYLCV) | | |
| tobacco | SEQ ID NO: 168 (encoded by SEQ ID | Constitutive | Vacuolar | 17025 |
| | NO: 482) (Endoglucanase) | (CYLCV) | | |
| tobacco | SEQ ID NO: 168 (encoded by SEQ ID | Constitutive | ER | 17029 |
| | NO: 482) (Endoglucanase) | (CYLCV) | | |
| tobacco | SEQ ID NO: 168 (encoded by SEQ ID | Constitutive | Plastid | 17043 |
| | NO: 482) (Endoglucanase) | (CYLCV) | | |
| maize | SEQ ID NO: 360 (encoded by SEQ ID | Leaf (PepC) | Vacuolar | 15942 |
| | NO: 483) (CBH1) | | | |
| maize | SEQ ID NO: 360 (encoded by SEQ ID | Leaf (PepC) | ER | 15944 |
| | NO: 483) (CBH1) | | | |
| maize | SEQ ID NO: 360 (encoded by SEQ ID | Leaf (PepC) | Plastid | 17026 |
| | NO: 483) (CBH1) | | | |
| maize | SEQ ID NO: 358 (encoded by SEQ ID | Leaf (PepC) | ER | 17013 |
| | NO: 484) (CBH2) | | | |
| maize | SEQ ID NO: 358 (encoded by SEQ ID | Leaf (PepC) | Vacuolar | 17014 |
| | NO: 484) (CBH2) | | | |
| maize | SEQ ID NO: 358 (encoded by SEQ ID | Leaf (PepC) | Plastid | 17042 |
| | NO: 484) (CBH2) | | | |
| maize | SEQ ID NO: 168 (encoded by SEQ ID | Leaf (PepC) | ER | 17084 |
| | NO: 485) (Endoglucanase) | | | |
| maize | SEQ ID NO: 168 (encoded by SEQ ID | Leaf (PepC) | Plastid | 17085 |
| | NO: 485) (Endoglucanase) | | | |
| maize | SEQ ID NO: 168 (encoded by SEQ ID | Leaf (PepC) | Vacuolar | 17086 |
| | NO: 485) (Endoglucanase) | | | |
| maize | SEQ ID NO: 360 (encoded by SEQ ID | Seed (rice glutelin) | ER | 15943 |
| | NO: 483) (CBH1) | | | |
| maize | SEQ ID NO: 34 (encoded by SEQ ID | Seed (rice glutelin) | ER | 17021 |
| | NO: 486) (CBH1) | | | |
| maize | SEQ ID NO: 358 (encoded by SEQ ID | Seed (rice glutelin) | ER | 17012 |
| | NO: 484) (CBH2) | | | |
| maize | SEQ ID NO: 168 (encoded by SEQ ID | Seed (rice glutelin) | ER | 17027 |
| | NO: 485) (Endoglucanase) | | | |
| soybean | SEQ ID NO: 360 (encoded by SEQ ID | Seed (rice glutelin) | PSV | 15928 |
| | NO: 480) (CBH1) | | | |
| soybean | SEQ ID NO: 360 (encoded by SEQ ID | Seed (rice glutelin) | ER | 15929 |
| | NO: 480) (CBH1) | | | |
| soybean | SEQ ID NO: 34 (encoded by SEQ ID | Seed (rice glutelin) | PSV | 15973 |
| | NO: 487) (CBH1) | | | |
| soybean | SEQ ID NO: 34 (encoded by SEQ ID | Seed (rice glutelin) | ER | 15983 |
| | NO: 487) (CBH1) | | | |
| soybean | SEQ ID NO: 358 (encoded by SEQ ID | Seed (rice glutelin) | PSV | 15975 |
| | NO: 481) (CBH2) | | | |
| soybean | SEQ ID NO: 358 (encoded by SEQ ID | Seed (rice glutelin) | ER | 15982 |
| | NO: 481) (CBH2) | | | |
| soybean | SEQ ID NO: 168 (encoded by SEQ ID | Seed (rice glutelin) | PSV | 17050 |
| | NO: 482) (Endoglucanase) | | | |
| soybean | SEQ ID NO: 168 (encoded by SEQ ID | Seed (rice glutelin) | ER | 15984 |
| | NO: 482) (Endoglucanase) | | | |

### Example 10

### Characterizing Enzymes of the Invention

[1172] In one embodiment, the invention provides polypeptides, e.g., enzymes, having beta-glycosidase activity, which can be used alone or in combinations, e.g., as “cocktails” or mixtures, in any variety of industrial applications, e.g., for biomass conversion, e.g., for biofuel production. This example characterizes selected properties of some exemplary polypeptides (e.g., enzymes) of this invention.

[1173] Substrate Specificity and Enzyme Activity Characterization

| | | | | | | Max if | |
|---|---|---|---|---|---|---|---|
| | | | | | | tot. | |
| | | | | | Max if tot. | conv. = | |
| SEQ ID | | | | | conv. = 200 | 300 | Max if tot. conv. = 500 |
| NO: | Activity | Family | Host strain | Vector | X2 | X3 | X5 |
| 551, 552 | β-glucosidase | GH1, 5 | XL1Blue-MR | pSE420-C′His | 94.2 | 94.7 | 112.8 |
| 625, 626 | Xylosidase | GH3, 3′ | XL1Blue-MR | pSE420-C′His | 117.3 | 152.6 | 364.0 |
| 547, 548 | B-glucosidase | GH1 | XL1Blue-MR | pSE420-C′His | 106.8 | 89.9 | 86.4 |
| 569, 570 | B-glucosidase | GH1 | GAL631 | pSE420-C′His | 100.4 | 84.9 | 94.0 |
| 681, 682 | arabinofuranosidase | GH3 | XL1Blue-MR | pSE420-C′His | 190.8 | 268.7 | 441.1 |
| 581, 582 | β-glucosidase | GH3 | GAL631 | pSE420-C′His | 91.1 | 85.9 | 97.1 |
| 669, 670 | Xylosidase | GH3, 3′ | XL1Blue-MR | pSE420-C′His | 92.3 | 82.3 | 163.1 |
| 563, 564 | B-glucosidase | GH1 | XL1Blue-MR | pSE420-C′His | 98.2 | 94.7 | 121.9 |
| 539, 540 | B-glucosidase | GH1 | XL1Blue-MR | pSE420-C′His | 79.2 | 91.2 | 111.3 |
| 561, 562 | B-glucosidase | GH1 | XL1Blue-MR | pSE420-C′His | 90.0 | 85.1 | 105.6 |
| 565, 566 | B-glucosidase | GH1 | XL1Blue-MR | pSE420-C′His | 85.6 | 87.9 | 101.4 |
| 525, 526 | β-glucosidase | GH3 | XL1Blue-MR | pSE420-C′His | 110.1 | 84.3 | 89.8 |
| 531, 532 | B-glucosidase | GH1 | XL1Blue-MR | pSE420-C′His | 123.2 | 117.1 | 78.1 |
| 645, 646 | β-glucosidase/Xylosidase | GH1 | XL1Blue-MR | pSE420-C′His | 93.2 | 95.4 | 122.3 |
| 423, 424 | β-glucosidase | GH1 | GAL631 | pSE420-C′His | 90.6 | 100.8 | 101.4 |
| 549, 550 | β-glucosidase | GH1 | XL1Blue-MR | pSE420-C′His | 143.0 | 89.6 | 138.0 |
| 529, 530 | B-glucosidase | GH1 | XL1Blue-MR | pSE420-C′His | 99.9 | 81.5 | 79.5 |
| 571, 572 | β-glucosidase | GH1 | GAL631 | pSE420-C′His | 99.4 | 92.5 | 114.0 |
| 573, 574 | β-glucosidase | GH3 | GAL631 | pSE420-C′His | 105.5 | 90.8 | 107.4 |
| 541, 542 | B-glucosidase | GH1 | XL1Blue-MR | pSE420-C′His | 106.1 | 88.3 | 83.6 |
| 543, 544 | B-glucosidase | GH1 | XL1Blue-MR | pSE420-C′His | 103.9 | 81.2 | 80.7 |
| 553, 554 | B-glucosidase | GH1 | XL1Blue-MR | pSE420-C′His | 100.4 | 92.2 | 128.7 |
| 559, 560 | β-glucosidase | GH1 | XL1Blue-MR | pSE420-C′His | 97.1 | 80.4 | 86.0 |
| 595, 596 | β-glucosidase | GH3 | XL1Blue-MR | pSE420-C′His | 146.8 | 217.9 | 303.4 |
| 533, 534 | B-glucosidase | GH1 | GAL631 | pSE420-C′His | 133.7 | 27.6 | 126.1 |
| 575, 576 | B-glucosidase | GH1 | GAL631 | pSE420-C′His | 98.2 | 86.3 | 152.9 |
| 535, 536 | B-glucosidase | GH1 | M15pREP5 | pQET | 46.5 | 64.8 | 56.2 |
| 587, 588 | B-glucosidase | GH3 | GAL631 | pSE420-C′His | 104.0 | 98.0 | 112.0 |
| 583, 584 | B-glucosidase | GH3 | GAL632 | pSE420-C′His | 138.2 | 113.5 | 117.3 |
| 621, 622 | Xylosidase | GH3, 3′ | XL1Blue-MR | pSE420-C′His | 93.8 | 153.5 | 320.2 |
| 631, 632 | Oligomerase/Xylosidase | GH3 | P. pastorisx33 | pPICZAlpha | 90.1 | 88.6 | 243.5 |
| 589, 590 | β-glucosidase | GH1 | XL1Blue-MR | pSE420-C′His | 89.1 | 92.6 | 134.8 |
| 591, 592 | β-glucosidase | GH1 | GAL631 | pSE420-C′His | 113.0 | 104.7 | 142.4/109.3 |
| 527, 528 | B-glucosidase | GH3 | GAL631 | pSE420-C′His | 111.0 | 116.2 | 152.7 |
| 537, 538 | β-glucosidase | GH3 | M15pREP4 | pQET | 80.3 | 83.8 | 76.2 |
| 555, 556 | β-glucosidase | GH1 | M15pREP4 | pQET | 90.3 | 78.8 | 65.2 |
| 699, 700 | Xylosidase | GH52 | XL1Blue-MR | pSE420-C′His | 175.2 | 214.0 | 415.4 |

| SEQ ID | | Ara-Xyl | | | | | |
|---|---|---|---|---|---|---|---|
| NO: | Activity | hydrolysis | C2 | C5 | pNP-BD-Gluc | pNP-BD-Xyl | pNP-a-Ara |
| 551, 552 | β-glucosidase | no | 118.0 | 98.4 | 28.3 | 38.7 | 37.2 |
| 625, 626 | Xylosidase | no | 136.7 | 148.3 | 878.1 | 460.4 | 814.7 |
| 547, 548 | B-glucosidase | no | 109.2 | 233.0 | 153.9 | in anal | 33.8 |
| 569, 570 | B-glucosidase | no | 86.5 | 102.0 | 0.0 | 14.8 | 38.4 |
| 681, 682 | arabinofuranosidase | yes | 93.6 | 114.1 | 0.9 | 2.6 | 10.9 |
| 581, 582 | β-glucosidase | no | 87.1 | 115.1 | 3.6 | 16.7 | 38.5 |
| 669, 670 | Xylosidase | no | 105.4 | 97.2 | −0.6 | 34.2 | 22.4 |
| 563, 564 | B-glucosidase | no | 115.7 | 110.1 | 425.3 | 41.2 | 35.7 |
| 539, 540 | B-glucosidase | no | 108.6 | 116.8 | 642.0 | 62.0 | 35.8 |
| 561, 562 | B-glucosidase | yes | 138.9 | in anal | in anal | in anal | in anal |
| 565, 566 | B-glucosidase | no | 114 | 141.1 | 129.6 | 13.9 | 35.6 |
| 525, 526 | β-glucosidase | no | 82.1 | 174.4 | 31.9 | 14.0 | 37.3 |
| 531, 532 | B-glucosidase | no | 89.0 | 227.7 | 311.6 | 19.5 | 37.7 |
| 645, 646 | β-glucosidase/Xylosidase | no | 131.4 | 105.1 | −0.6 | 38.5 | 36.1 |
| 423, 424 | β-glucosidase | no | 174.7 | 248.8 | 665.7 | 17.4 | 39.7 |
| 549, 550 | β-glucosidase | no | 139.8 | 136.3 | 311.2 | 42.0 | 37.1 |
| 529, 530 | B-glucosidase | no | 79.7 | 97.0 | 53.7 | 4.0 | 34.2 |
| 571, 572 | β-glucosidase | no | 145.5 | 134.0 | 253.9 | 23.2 | 42.7 |
| 573, 574 | β-glucosidase | no | 96.5 | 88.7 | 0.0 | 12.8 | 37.6 |
| 541, 542 | B-glucosidase | no | 111.0 | 219.2 | 97.7 | 4.3 | 34.0 |
| 543, 544 | B-glucosidase | no | 88.2 | 93.5 | 43.1 | 5.3 | 34.3 |
| 553, 554 | B-glucosidase | no | 133.5 | 100.9 | 234.4 | 39.0 | 36.7 |
| 559, 560 | β-glucosidase | no | 122.3 | 233.5 | 554.7 | 29.6 | 39.0 |
| 595, 596 | β-glucosidase | no | 97.5 | 90.9 | 0.0 | 13.4 | 38.0 |
| 533, 534 | B-glucosidase | no | 122.6 | 101.3 | 0.0 | 13.1 | 37.9 |
| 575, 576 | B-glucosidase | yes | 149.2 | 257.9 | 1006.0 | 257.1 | 39.4 |
| 535, 536 | B-glucosidase | no | 88.8 | 70.5 | 5.8 | 11.8 | 42.9 |
| 587, 588 | B-glucosidase | no | 127.1 | 268.6 | 977.9 | 104.7 | 60.4 |
| 583, 584 | B-glucosidase | no | 141.2 | 170.0 | 11.8 | 13.6 | 38.9 |
| 621, 622 | Xylosidase | no | 135.9 | 100.3 | 2.3 | 38.2 | 23.6 |
| 631, 632 | Oligomerase/Xylosidase | no | 68.6 | 101.5 | 13.4 | 312.7 | 50.7 |
| 589, 590 | β-glucosidase | no | 100.0 | 103.3 | 14.8 | 36.4 | 22.4 |
| 591, 592 | β-glucosidase | yes? | 138.9* | 302.9 | 1010.8 | 51.7 | 38.5 |
| 527, 528 | B-glucosidase | yes? | 150.6 | 223.7 | 158.9 | 16.0 | 39.0 |
| 537, 538 | β-glucosidase | no | 90.7 | 87.6 | 99.9 | 11.8 | 2.6 |
| 555, 556 | β-glucosidase | no | 124.8 | 116.6 | 803.0 | 89.5 | 40.0 |
| 699, 700 | Xylosidase | yes | 138.2 | 106.2 | 0.1 | 167.9 | 38.5 |

| SEQ ID | | | | | | | |
|---|---|---|---|---|---|---|---|
| NO: | Activity | Family | Host strain | Vector | temp opt | pH opt | S.A. |
| 531, 532 | B-glucosidase | GH1 | XL1Blue-MR | pSE420-C′His | 37 | 6 | 8.02 |
| 645, 646 | β- | GH1 | XL1Blue-MR | pSE420-C′His | 37 | 5 | 14.94 |
| | glucosidase/Xylosidase | | | | | | |
| 541, 542 | B-glucosidase | GH1 | XL1Blue-MR | pSE420-C′His | 37 | 6 | 0.43 |
| 595, 596 | β-glucosidase | GH3 | XL1Blue-MR | pSE420-C′His | 37 | 5 | 0.489 |
| 591, 592 | β-glucosidase | GH1 | GAL631 | pSE420-C′His | 37 | 6 | 2.699 |
| 431, 432 | Glycosidase | GH1, 5 | XL1Blue-MR | pSE420-C′His | 60 | 6 | 0.7 |
| 547, 548 | B-glucosidase | GH1 | XL1Blue-MR | pSE420-C′His | 60 | 6 | 3.5 |
| 539, 540 | B-glucosidase | GH1 | XL1Blue-MR | pSE420-C′His | 60 | 7 | 10.86 |
| 545, 546 | B-glucosidase | GH1 | XL1Blue-MR | pSE420-C′His | 60 | 5 | 3.83 |
| 565, 566 | B-glucosidase | GH1 | XL1Blue-MR | pSE420-C′His | 60 | 6 | 0.89 |
| 525, 526 | β-glucosidase | GH3 | XL1Blue-MR | pSE420-C′His | 60 | 5 | 0.5 |
| 549, 550 | B-glucosidase | GH1 | XL1Blue-MR | pSE420-C′His | 60 | 7 | 4.06 |
| 529, 530 | B-glucosidase | GH1 | XL1Blue-MR | pSE420-C′His | 60 | 6 | 2.75 |
| 543, 544 | B-glucosidase | GH1 | XL1Blue-MR | pSE420-C′His | 60 | 6 | 0.264 |
| 575, 576 | B-glucosidase | GH1 | GAL631 | pSE420-C′His | 60 | 6 | 164 |
| 589, 590 | β-glucosidase | GH1 | XL1Blue-MR | pSE420-C′His | 60 | 5 | 0.31 |
| 537, 538 | β-glucosidase | GH3 | M15pREP4 | pQET | 60 | 5 | 2.25 |
| 563, 564 | B-glucosidase | GH1 | XL1Blue-MR | pSE420-C′His | 80 | 6 | 13.5 |
| 553, 554 | B-glucosidase | GH1 | XL1Blue-MR | pSE420-C′His | 80 | 6 | 3 |
| 559, 560 | β-glucosidase | GH1 | XL1Blue-MR | pSE420-C′His | 80 | 6 | 4.26 |
| 569, 570 | B-glucosidase | GH1 | GAL631 | pSE420-C′His | | | |
| 581, 582 | β-glucosidase | GH3 | GAL631 | pSE420-C′His | | 5 | |
| 423, 424 | β-glucosidase | GH1 | GAL631 | pSE420-C′His | | 6 | |
| 571, 572 | β-glucosidase | GH1 | GAL631 | pSE420-C′His | | 7 | |
| 577, 578 | β-glucosidase | GH3 | GAL631 | pSE420-C′His | | 5 | |
| 573, 574 | β-glucosidase | GH3 | GAL631 | pSE420-C′His | | | |
| 533, 534 | B-glucosidase | GH1 | GAL631 | pSE420-C′His | | | |
| 535, 536 | B-glucosidase | GH1 | M15pREP5 | pQET | | | |
| 587, 588 | B-glucosidase | GH3 | GAL631 | pSE420-C′His | | | |
| 557, 558 | B-glucosidase | GH3 | P. pastorisx33 | pPICZAlpha | | | |
| 527, 528 | B-glucosidase | GH3 | GAL631 | pSE420-C′His | | 7 | |

| | | | Activity | | | |
|---|---|---|---|---|---|---|
| | | Specific Activity, | on | Activity on | | |
| SEQ ID | | 37 C. (pNP-B- | C2? | Cellopentose? | | |
| NO: | Activity | Glucopyranoside) | (37 C.) | (37 C.) | Active at 55 C.? | Active pH Range (55 C.) |
| 531, 532 | B-glucosidase | 311.6 | Y | Y | Y | 7, 9 |
| 645, 646 | β- | | | | | |
| | glucosidase/Xylosidase | | | | | |
| 541, 542 | B-glucosidase | 97.7 | Y | Y | Y | 5, 7, 9 |
| 595, 596 | β-glucosidase | 0.0 | | | | |
| 591, 592 | β-glucosidase | 1010.8 | Y | Y | Y | 5, 7, 9 |
| 431, 432 | Glycosidase | | | | | |
| 547, 548 | B-glucosidase | 153.9 | Y | Y | Y | 5, 7, 9 |
| 539, 540 | B-glucosidase | | | | | |
| 545, 546 | B-glucosidase | | | | | |
| 565, 566 | B-glucosidase | 129.6 | Y | Y | Y | 5, 7, 9 |
| 525, 526 | β-glucosidase | 31.9 | Y | Y | | |
| 549, 550 | B-glucosidase | | | | | |
| 529, 530 | B-glucosidase | 53.7 | | | | |
| 543, 544 | B-glucosidase | 43.1 | | | | |
| 575, 576 | B-glucosidase | 1006.0 | Y | Y | Y | 5, 7, 9 |
| 589, 590 | β-glucosidase | | | | | |
| 537, 538 | β-glucosidase | 99.9 | | | | |
| 563, 564 | B-glucosidase | 172.4 | | | | |
| 553, 554 | B-glucosidase | | | | | |
| 559, 560 | β-glucosidase | 554.7 | Y | Y | Y | 5, 7, 9 |
| 569, 570 | B-glucosidase | 0.0 | | | | |
| 581, 582 | β-glucosidase | 3.6 | | | | |
| 423, 424 | β-glucosidase | 665.7 | Y | Y | N | |
| 571, 572 | β-glucosidase | 253.9 | Y | Y | | |
| 577, 578 | β-glucosidase | | | | | |
| 573, 574 | β-glucosidase | 0.0 | | | | |
| 533, 534 | B-glucosidase | 0.0 | | | | |
| 535, 536 | B-glucosidase | 5.8 | | | | |
| 587, 588 | B-glucosidase | 977.9 | | | Y | |
| 557, 558 | B-glucosidase | | | | Y | 5, 7, 9 |
| 527, 528 | B-glucosidase | 158.9 | Y | Y | N | |

| | | Product Inhibition (1 = Inhibition at Low Glucose Doses, 2 = | | |
|---|---|---|---|---|
| | pH Optima | Inhibition at Higher Glucose Doses, 3 = Minimal Inhibition at | | |
| SEQ ID NO: | 55 C. | High Glucose Doses) | active at ≧ 50 C. | active at ≧ 60 C. |
| 531, 532 | 7 | | | |
| 645, 646 | | | | |
| 541, 542 | 7 | | Y | Y |
| 595, 596 | | | | |
| 591, 592 | 5, 7 | 2 | Y | Y |
| 431, 432 | | | | |
| 547, 548 | 5 | | Y | Y |
| 539, 540 | | | Y | Y |
| 545, 546 | | | Y | Y |
| 565, 566 | 5 | | Y | Y |
| 525, 526 | | | Y | Y |
| 549, 550 | | | Y | |
| 529, 530 | | | Y | |
| 543, 544 | | | | |
| 575, 576 | 5, 7 | 3 | | |
| 589, 590 | | | | |
| 537, 538 | | | | |
| 563, 564 | | | Y | Y |
| 553, 554 | | | Y | Y |
| 559, 560 | 7 | 2 | Y | Y |
| 569, 570 | | | | |
| 581, 582 | | | | |
| 423, 424 | | | | |
| 571, 572 | | | | |
| 577, 578 | | | Y | Y |
| 573, 574 | | | | |
| 533, 534 | | | | |
| 535, 536 | | | | |
| 587, 588 | | | Y | Y |
| 557, 558 | | 1 | Y | Y |
| 527, 528 | | | | |

| | | | | | | | | % residual | | |
|---|---|---|---|---|---|---|---|---|---|---|
| | | | | | | | % residual | activity | % residual | |
| | | | | | Activity at | Activity at | activity | after | activity after | Activity |
| SEQ ID | | | Host | | 37-90 C. at | 37-90 C. at | after 0-4 h | 0-4 h at | 0-4 h at | at 50 C. |
| NO: | Activity | Family | strain | Vector | pH 5** | pH 7** | at 60 C.*** | 70 C.*** | 80 C.*** | pH5**** |
| 531, 532 | B-glucosidase | GH1 | XL1Blue- | pSE420- | 37-40 (10% | 37-40 (10% | 0 after 1 h | 0 after 1 h | 0 after 1 h | |
| | | | MR | C′His | at 50 C.) | at 50 C.) | | | | |
| 549, 550 | B-glucosidase | GH1 | XL1Blue- | pSE420- | 37-40 (20% | 37-50 | NT | NT | NT | 227 mM |
| | | | MR | C′His | at 50 C.) | | | | | glucose |
| 561, 562 | B-glucosidase | GH1 | XL1Blue- | pSE420- | 37-40 (60% | 37-40 (60% | 0 | 0 | 0 | |
| | | | MR | C′His | at 50 C.) | at 50 C.) | | | | |
| 525, 526 | β-glucosidase | GH3 | XL1Blue- | pSE420- | 37-50 | 37-50 | NT | 0 after 1 h | 0 after 1 h | 457 mM |
| | | | MR | C′His | | | | | | glucose |
| 545, 546 | B-glucosidase | GH1 | XL1Blue- | pSE420- | 37-50 (20% | 37-50 (20% | 0 after 1 h | 0 after 1 h | 0 after 1 h | 520 mM |
| | | | MR | C′His | at 60 C.) | at 60 C.) | | | | glucose |
| 577, 578 | β-glucosidase | GH3 | GAL631 | pSE420- | 37-50 (50% | 37-60 | 0 | 0 | 0 | 440 mM |
| | | | | C′His | at 60 C.) | (weak) | | | | glucose |
| 553, 554 | B-glucosidase | GH1 | XL1Blue- | pSE420- | 37-60 | 37-60 | 50% after 1 h, | 0 after 1 h | 0 after 1 h | 433 mM |
| | | | MR | C′His | | | 25% after 2 h, | | | glucose |
| | | | | | | | 0% after | | | |
| | | | | | | | 3 h (all | | | |
| | | | | | | | C); 7% after | | | |
| | | | | | | | 0.5 h at GP | | | |
| 529, 530 | B-glucosidase | GH1 | XL1Blue- | pSE420- | 37-60 | 37-60 | 90% after 4 h | 0 | 0 | 345 mM |
| | | | MR | C′His | | | (C); 80% after | | | glucose |
| | | | | | | | 4 h (GP) | | | |
| 557, 558 | B-glucosidase | GH3 | P. | pPICZAlpha | 37-60 | 37-50 | 10% after 0.5 h | 0 | 0 | 338 mM |
| | | | pastorisx33 | | (<20% at | | at 60 C., 0 after | | | glucose |
| | | | | | 70 C.) | | 1 h (both C. | | | |
| | | | | | | | and GP) | | | |
| 541, 542 | B-glucosidase | GH1 | XL1Blue- | pSE420- | 37-60 (20% | 37-60 (10% | 10% after 1 h, | 0 | 0 | 333 mM |
| | | | MR | C′His | at 70 C.) | at 70 C.) | 5% after 3 h | | | glucose |
| | | | | | | | (C); 0 (GP) | | | |
| 563, 564 | B-glucosidase | GH1 | XL1Blue- | pSE420- | 37-60 (50% | 37-60 (50% | 100% after 4 h | 0 | 0 | |
| | | | MR | C′His | at 70 C.) | at 70 C.) | (C); 70% after | | | |
| | | | | | | | 4 h (GP) | | | |
| 591, 592 | β-glucosidase | GH1 | GAL631 | pSE420- | 37-60 (50% | 37-50 (40% | 0 after 1 h (C, | 0 after 1 h | 0 after 1 h | 174 mM |
| | | | | C′His | at 70 C.) | at 60 C.) | GP) | (C, GP) | (C, GP) | glucose |
| 543, 544 | B-glucosidase | GH1 | XL1Blue- | pSE420- | 37-60 | 37-60 | NT | NT | NT | |
| | | | MR | C′His | (weak at all | (weak at all | | | | |
| | | | | | Ts) | Ts) | | | | |
| 595, 596 | β-glucosidase | GH3 | XL1Blue- | pSE420- | 37-60 | 37-50 | NT | NT | NT | |
| | | | MR | C′His | (weak) | | | | | |
| 547, 548 | B-glucosidase | GH1 | XL1Blue- | pSE420- | 37-70 (25% | 37-60 (60% | 100% (90% | 0 | 0 | 423 mM |
| | | | MR | C′His | at 80 C.) | at 70 C.) | after 4 h) | | | glucose |
| 559, 560 | β-glucosidase | GH1 | XL1Blue- | pSE420- | 37-80 | 37-90 | 90% after 4 h | 90% after | 140% after | 164 mM |
| | | | MR | C′His | | | (C); 70% after | 4 h (C); | 4 h on C, | glucose |
| | | | | | | | 4 h (GP) | 60% after | confirm!20% | |
| | | | | | | | | 4 h (GP) | after 4 h | |
| | | | | | | | | | (GP) | |
| 537, 538 | β-glucosidase | GH3 | M15pREP4 | pQET | 37-80 | NA | NT | NT | NT | |
| | | | | | (weak at all | | | | | |
| | | | | | Ts) | | | | | |
| 587, 588 | B-glucosidase | GH3 | GAL631 | pSE420- | 37-90 | 37-40 | 25% after | 0 | 0 | 260 mM |
| | | | | C′His | | | 0.5 h, 0 after | | | glucose |
| | | | | | | | 3 h(C); 0 after | | | |
| | | | | | | | 1 h (GP) | | | |

| SEQ ID | | Product inhibition | % purity of | | |
|---|---|---|---|---|---|
| NO: | Activity | (mM glucose) | prep | Activity at 37 C. pH5**** | Activity at 50 C. pH5**** |
| 531, 532 | B-glucos idase | NT | | | |
| 549, 550 | B-glucosidase | NT | 8 | 294 mM glucose; 10 U/ml | 227 mM glucose |
| 561, 562 | B-glucosidase | NT | | | |
| 525, 526 | β-glucosidase | 25 | 5 | 423 mM glucose; 4 U/ml | 457 mM glucose |
| 545, 546 | B-glucosidase | 25 | <3 | 450 mM glucose; 5 U/ml | 520 mM glucose |
| 577, 578 | β-glucosidase | NT | 8 | 232 mM glucose; 2 U/ml | 440 mM glucose |
| 553, 554 | B-glucosidase | 100 (starts at 50) | 11 | 362 mM glucose; 2 U/ml | 433 mM glucose |
| 529, 530 | B-glucosidase | 200 (starts at 50) | 8 | 277 mM glucose; 6 U/ml | 345 mM glucose |
| 557, 558 | B-glucosidase | 50 (starts at 25) | 35 | 488 mM glucose; 10 U/ml | 338 mM glucose |
| 541, 542 | B-glucosidase | 200 (starts at 25) | <3 | 412 mM glucose; 2 U/ml | 333 mM glucose |
| 563, 564 | B-glucosidase | >200, starts at 25 | | | |
| 591, 592 | β-glucosidase | 200 (starts at 25) | 7 | 158 mM glucose; 24 U/ml | 174 mM glucose |
| 543, 544 | B-glucosidase | NT | | | |
| 595, 596 | β-glucosidase | NT | | | |
| 547, 548 | B-glucosidase | 400 (starts at 100) | <5 | 461 mM glucose; 3 U/ml | 423 mM glucose |
| 559, 560 | β-glucosidase | 100 (starts at 25); | <3 | 242 mM glucose; 8 U/ml | 164 mM glucose |
| | | confirm with new | | | |
| | | batch | | | |
| 537, 538 | β-glucosidase | NT | | | |
| 587, 588 | B-glucosidase | 100 (starts at 25) | 8 | 273 mM glucose; 13 U/ml | 260 mM glucose |

*All enzymes tested at pH 5 and pH 7, 10 mM cellobiose, 30 min at 37° C., 40° C., 50° C., 60° C., 70° C., 80° C. and 90° C.
**10 mM celobiose substrate
***C = cellobiose; GP = 4MU-GP substrate
****Endpoint, 30 min reaction, 10 mM cellobiose pH 5; 0.5 mg SPEED prep, 0.4 mg A. niger beta-glucosidase (b-gluc); mM glucose released; U/ml on fluorescent substarte (4MU-GP)
Cellobiose digest 30 min at pH5/60 C.; 4MU-GP digest 20 min at pH5/RT

### Example 11

### Protein Analysis of Transgenic Plants

[1174] The invention provides transgenic plants (and cells and seeds and plant parts derived from those transgenic plants) comprising expression systems of this invention comprising vectors, recombinant viruses, artificial chromosomes, etc. of this invention, and/or comprising nucleic acids of this invention, including nucleic acids encoding enzymes of this invention, and including sequences complementary to the enzyme-encoding sequences; and this example describes making some of these embodiments.

[1175] Protein extracts were obtained from approximately 100 mg of leaf tissue or flour generated from maize and soybean seed from non-transgenic and transgenic plants. Leaf material was placed into 96 deep well blocks containing small steel balls and pre-cooled on dry ice. Samples were ground to a fine powder using a GENO/GRINDER™ (SPEC/CERTIPREP™, Metuchen, N.J.). Flour samples were prepared by pooling approximately 10-20 seed and grinding to a fine powder using a KLECO™ Grinder (Gracia Machine Company, Visalia, Calif.). Samples were extracted in 250-500 μl of either Western Extraction Buffer (WEB=12.5 mM sodium borate, pH10; 2% BME; and 1% SDS) or assay buffer at room temperature for approximately 30 minutes followed by centrifugation for 5 minutes at 13,000 rpm.

[1176] SDS-polyacrylamide gel electrophoresis (SDS-PAGE) was performed by transferring 100 μl of WEB samples to an Eppendorf tube and add 25 μl 4× BioRad LDS or modified BIORAD™ (Hercules, Calif.) loading buffer (4× BioRad LDS:BME at a ratio of 2:1). Heat samples for 10 minutes at 70° C. then immediately place on ice for 5 minutes. Spin samples briefly, and transfer back on to ice. Sample extracts (5-10 μl) were run on BioRad 4-12% Bis/Tris protein gel (18 well) using MOPS buffer.

[1177] Immunoblot analysis was performed by transferring SDS-PAGE gels onto a nitrocellulose membrane using chilled NUPAGE™ transfer buffer (Invitrogen) for 30 minutes at 100 volts. Total protein transferred to the blot was visualized using Ponceau stain (Sigma). Following Ponceau staining, the membrane was incubated in blocking buffer for 30 minutes in TBST wash buffer (30 mM Tris-HCL, pH 7.5, 100 mM NaCl, and 0.05% Tween 20) with 3% dry milk, then washed three times for 5 minutes in TBST. Polyclonal goat or rabbit primary antibody was added at 1 ug/ml in TBST wash buffer with 3% milk, and the blot incubated 2 hours to overnight. Following overnight incubation, the blot was washed three times for 5 minutes each in TBST wash buffer. Secondary antibody (Rabbit-AP or Goat-AP) was diluted 1:8000 (in TBST) and added to blot for 30 minutes. Following incubation in the secondary antibody, the blot was again washed three times for 5 minutes each. Visualization of immuno reactive bands was carried out by adding Moss BCIP/NBT—alkaline phosphatase substrate. Blots were rinsed thoroughly in water following incubation in the BCIP/NBT substrate and allowed to air dry.

[1178] Western blots analysis of sample extracts used for activity analysis showed a correlation between accumulation of an immuno-reactive protein and enzyme activity (described in Example 12). CBH1 with ER targeting sequence (construct 15936) was detected as a band that migrates close to the predicted size of the full length enzyme (56.6 kD). A second, smaller band of about 51 kD was also detected in the western blot. CBH1 targeted to the leaf vacuole (construct 15935) accumulated predominantly as a 51 kD protein. Western blot data for transgenic plants generated with constructs 15935 and 15936 are summarized in table 8, below.

[1179] Western blot analysis was used to screen transgenic maize plants generated with construct 15942 and construct 15944. The maize leaf expressed SEQ ID NO:360 CBH1 with ER targeting sequence (construct 15944) was detected as a band that migrates close to the predicted size of the full length enzyme (57 kD). A second, broad band centered around 51 kD was also detected. Vacuolar targeted SEQ ID NO:360 CBH1 (construct 15942) shows a broad band at approximately 51 kD with a minor band at 57 kD. Western blot data is summarized in table 9, below, for construct 15942 and table 10, below for construct 15944.

### Example 12

### Enzyme Extraction and Activity Analysis of Transgenic Events

[1180] In one embodiment, isolated or recombinant enzymes or other polypeptides of the invention are harvested from transgenic plants, cells, seeds and/or plant parts of this invention; and this example describes an exemplary embodiment.

[1181] Approximately 100 mg of fresh leaf tissue or seed flour of a transgenic plant was extracted in 5 to 10 ml of one of the following buffers: (A) 100 mM Na acetate, 0.02% Tween, 0.02% Na azide pH 4.75, 1% PVP and COMPLETE™ protease inhibitor cocktail tablets (Roche); (B) 100 mM Na acetate, 1 mg/ml BSA, 0.02% Tween, and 0.02% Na azide pH 4.75; or (C) 100 mM Sodium Acetate pH 5.3, 100 mM NaCl, 1 mg/ml Gelatin, 1 mM EDTA, 0.02% TWEEN-20™, 0.02% NaN₃. Alternative buffers for extracting protein from leaf or from seed are well known in the art. Samples were placed on benchtop rotators for 30-60 minutes then centrifuged at 3000 rpm for 10 minutes. For fresh leaf samples, the amount of total protein extracted was measured by Pierce BCA protocol as outlined in product literature. Cellulase activity assays were carried out using one of the following substrates: pNP-lactoside, methylumbelliferyl-lactoside (MUL), carboxymethyl-cellulose, oat-β glucan, phosphoric acid treated cellulose (PASC), Avicel, or other commercially available substrates used for measuring cellulase activity following previously published protocols (see, e.g., Methods in Enzymology, Vol 160). Enzyme activity data generated for transgenic plants is outlined in tables 8 through 10, below.

TABLE 8
Summary of cellobiohydrolase I (CBHI) activity in transgenic
tobacco events expressing dicot optimized SEQ ID NO: 360
targeted to the vacuole (construct 15935) and ER
(construct 15936) of tobacco leaves. Samples were extracted
in buffer A and CBH1 activity was assayed on
methylumbelliferyl-lactoside as the substrate.

| Construct | Plant ID | nmol/min/mg | | AVICEL ™ |
|---|---|---|---|---|
| number | number | protein | Western blot | binding assay |
| 15935 | Nt22-1A | 0.466 | + | ND |
| 15935 | Nt22-6B | 0.519 | + | ND |
| 15935 | Nt22-7A | 0.685 | + | ND |
| 15935 | Nt22-10A | 0.587 | + | ND |
| 15935 | Nt22-11A | 0.500 | + | ND |
| 15935 | Nt22-15A | 0.363 | + | ND |
| 15935 | Nt22-16A | 1.337 | + | + |
| 15935 | Nt22-17A | 0.650 | + | ND |
| 15935 | Nt22-18A | 1.079 | + | ND |
| 15935 | Nt22-19A | 0.009 | − | − |
| 15935 | Nt22-23B | 1.811 | + | + |
| 15935 | Nt22-24B | 1.151 | + | ND |
| 15935 | Nt22-30B | 1.338 | + | ND |
| 15936 | Nt23-2B | 0.170 | + | ND |
| 15936 | Nt23-5A | 0.118 | + | ND |
| 15936 | Nt23-9A | 0.670 | + | ND |
| 15936 | Nt23-11A | 0.666 | + | + |
| 15936 | Nt23-12A | 0.410 | + | ND |
| 15936 | Nt23-16A | 0.354 | + | ND |
| 15936 | Nt23-17B | 0.597 | + | ND |
| 15936 | Nt23-22A | 0.484 | + | ND |
| 15936 | Nt23-23B | 0.907 | + | + |
| 15936 | Nt23-24B | 0.162 | + | ND |
| 15936 | Nt23-26B | 0.203 | + | ND |
| 15936 | Nt23-29B | 0.626 | + | ND |
| 15936 | Nt23-30B | 0.082 | − | − |
| 15936 | Nt23-32B | 0.190 | + | ND |
| Non- | Non- | 0.007 | − | ND |
| transgenic | transgenic | | | |
| control | control | | | |
| Non- | Non- | −0.010 | − | ND |
| transgenic | transgenic | | | |
| control | control | | | |

ND = not determined

TABLE 9
Summary of cellobiohydrolase I (CBHI) activity in transgenic maize
events (construct 15942) expressing monocot optimized SEQ
ID NO: 360 targeted to the vacuole of maize leaves. Samples
were extracted in buffer A and CBH1 activity was assayed on
methylumbelliferyl-lactoside as the substrate.

| | Avg nmol/min/mg | Standard | |
|---|---|---|---|
| Plant ID Number | Protein | Deviation | Western Blot |
| 001A | 1.51 | 0.46 | + |
| 002A | 0.63 | 0.05 | + |
| 003A | 0.53 | 0.18 | + |
| 004A | 1.01 | 0.34 | + |
| 005A | 0.04 | 0.01 | − |
| 006A | 0.03 | 0.01 | − |
| 007A | 2.34 | 0.48 | + |
| 008A | 0.48 | 0.05 | + |
| 009A | 0.65 | 0.05 | + |
| 011A | 0.11 | 0.05 | − |
| 012A | 1.47 | 0.12 | + |
| 013A | 1.88 | 0.62 | + |
| 014A | 0.68 | 0.14 | + |
| 015A | 3.45 | 0.17 | + |
| 016A | 3.17 | 0.42 | + |
| 018A | 2.32 | 0.52 | + |
| 019A | 4.33 | 2.02 | + |
| 021A | 0.88 | 0.01 | + |
| 022A | 2.69 | 0.15 | + |
| 023A | 0.03 | 0.00 | − |
| 024A | 4.84 | 0.36 | + |
| 025A | 1.77 | 0.22 | + |
| 026A | 0.57 | 0.04 | + |
| 027A | 1.87 | 0.77 | + |
| 028A | 8.43 | 1.09 | + |
| 029A | 1.88 | 0.70 | + |
| 030A | 1.08 | 0.04 | + |
| Nontransgenic | 0.07 | 0.00 | − |
| control | | | |

TABLE 10
Summary of cellobiohydrolase I (CBHI) activity in transgenic maize
events (construct 15944) expressing the monocot optimized,
exemplary SEQ ID NO: 360 of the invention targeted to the ER of
maize leaves. Samples were extracted in buffer A and CBH1 activity
was assayed on methylumbelliferyl-lactoside as the substrate.

| | Avg nmol/min/mg | Standard | |
|---|---|---|---|
| Plant ID Number | protein | Deviation | Western Blot |
| 001A | 1.71 | 0.09 | + |
| 002A | 0.01 | 0.00 | − |
| 003A | 1.10 | 0.13 | + |
| 004A | 0.03 | 0.00 | − |
| 005A | 0.63 | 0.04 | + |
| 006A | ND | ND | − |
| 007A | ND | ND | − |
| 008A | ND | ND | − |
| 009A | 1.20 | 0.04 | + |
| 010A | ND | ND | − |
| 011A | ND | ND | + |
| 012A | 1.34 | 0.09 | + |
| 013A | 5.85 | 0.43 | + |
| 014A | 1.20 | 0.07 | + |
| 015A | 1.95 | 0.19 | + |
| 016A | ND | ND | − |
| 017A | 2.50 | 0.07 | + |
| 018A | ND | ND | + |
| 019A | ND | ND | − |
| 020A | 0.91 | 0.07 | + |
| 021A | 2.34 | 0.05 | + |
| 022A | ND | ND | − |
| 023A | ND | ND | + |
| 024A | ND | ND | − |
| 025A | ND | ND | + |
| 026A | ND | ND | + |
| 027A | 1.51 | 0.09 | + |
| 028A | ND | ND | + |
| 029A | ND | ND | + |
| 030A | ND | ND | + |
| 031A | 2.36 | 0.07 | + |
| 032A | ND | ND | − |
| 033A | 1.59 | 0.11 | + |
| 034A | ND | ND | + |
| 035A | 1.14 | 0.11 | + |
| 036A | 1.06 | 0.09 | + |
| 037A | 1.27 | 0.21 | + |
| 038A | 0.55 | 0.01 | + |
| 039A | 1.51 | 0.02 | + |
| 040A | 1.36 | 0.15 | + |
| 041A | 0.53 | 0.01 | + |
| 042A | 0.02 | 0.00 | − |
| 043A | 1.15 | 0.05 | + |
| 044A | 0.81 | 0.03 | + |
| 045A | ND | ND | − |
| 046A | 0.52 | 0.03 | + |

ND = not determined

### Example 13

### Crystalline Cellulose Binding and Hydrolysis Assays

[1182] In one embodiment, isolated, synthetic or recombinant enzymes or other polypeptides of the invention bind to and/or catalyze the hydrolysis of cellulose, e.g., crystalline cellulose, and this example describes an exemplary embodiment and assay—which can be used to determine if a polypeptide has enzymatic, e.g., hydrolase, such as cellulase, activity.

[1183] AVICEL™ Microcrystalline Cellulose (MCC) Binding Assay: Approximately 100 mg of leaf tissue was extracted in 5 mL of assay buffer (A), as described above. Following extraction, approximately 250 ul of sample was incubated with 25 mg AVICEL™ MCC for 0 and 60 minutes. Zero time point samples were added to Eppendorf tubes placed on ice prior to addition of extracts and immediately processed. Samples were incubated for 60 minutes on a benchtop vortex at room temperature. After incubation, samples were centrifuged for 5 minutes at 13000 rpm in an Eppendorf centrifuge. Supernatants were carefully removed and the AVICEL™ MCC washed 3× with ice cold water. Following the final wash, 80 ul of western extraction buffer (WEB) and 25 ul of BioRad 4× loading buffer was added the sample. Samples were vortexed then placed at 70 degrees for 10 minutes. The AVICEL™ MCC was pelleted at 13000 rpm and the supernatants removed and analyzed by western blot as described above.

[1184] Transgenic plants derived from construct 15935 (Nt22-16A, Nt22-19A) and construct 15936 (Nt23-11A, Nt23-23B, Nt23-30B) were analyzed through the Avicel MCC Binding assay described in the above paragraph. Plants Nt22-16A, Nt23-11A and Nt23-23B were positive by western blot analysis while plants Nt22-19A and Nt23-30B were negative in the AVICEL™ MCC Binding assay. This data is summarized in Table 8, above.

[1185] AVICEL™ MCC Hydrolysis assay. Transgenic leaf samples were lyophilized then ground to a find powder using a Kleco grinder. Approximately 150 mg of ground leaf material was weighed out and extracted in 4 ml of buffer A at RT for 30 minutes. Samples were centrifuged and supernatants removed. One ml of each leaf extract, fungal expressed SEQ ID NO:360 or Trichoderma reesei CBH1 (Megazyme International) enzyme, or fungal enzymes added to non-expressing transgenic extract was added to 50 mg of Avicel MCC and samples placed on a vortex at 37 degrees. Protein concentrations were measured using BCA reagent (Pierce). Duplicate 100 μl samples were removed at 0, 24, 48, and 72 hours. Sugar analysis was carried out by HPLC analysis. Data generated for maize transgenic plants transformed with construct 15944 (the exemplary SEQ ID NO:360 CBH1 targeted to the ER) is shown in table 11, below.

[1186] Protein extracts from the transgenic plants were equivalent for total protein content; however, the data does not represent the relative level of expression of the exemplary SEQ ID NO:360 in transgenic plants. The data in table 11 demonstrates that plant expressed cellulases are active in the AVICEL™ MCC assay which demonstrates binding of the cellulase to a substrate and subsequent cellulase activity.

TABLE 11
Liberation of cellobiose from AVICEL ™ MCC

| | mg/mL cellobiose | Standard |
|---|---|---|
| Transgenic number | produced at 72 hours | Deviation |
| 013A | 2.644 | 0.264 |
| 017A | 1.549 | 0.366 |
| 036A | 1.631 | 0.710 |
| 042A (negative control) | −0.086 | 0.001 |
| 042A + SEQ ID NO: 360 fungal | 0.317 | 0.087 |
| enzyme (0.09 mg/ml) | | |
| 042A + MegaTr. (0.25 mg/ml) | 3.226 | 0.083 |
| SEQ ID NO: 360 fungal enzyme | 1.565 | 0.734 |
| (0.09 mg/ml) | | |
| Megazyme TrCBH1 fungal | 3.719 | 0.831 |
| enzyme (0.05 mg/ml) | | |
| Buffer only | 0 | 0 |

Mega Tr. = commercially available CBH1, Megazyme TrCBH1

### Example 14

### β-Glucosidase Activity Assays

[1187] In one embodiment, isolated, synthetic or recombinant enzymes or other polypeptides of the invention have a β-glucosidase activity. This example describes an exemplary assay designed to measure activity of β-glucosidase enzymes on pNP-β-D-glucopyranoside substrate. This exemplary assay can be used to determine if a polypeptide has β-glucosidase, and is within the scope of this invention.

[1188] Enzyme activity is described in U/mL. If the protein concentration (mg/mL) is available, this value could be used to calculate enzyme specific activity (U/mg).

[1189] Unit Definition

[1190] One unit of activity is defined as the quantity of enzyme required to liberate one μmole of p-Nitrophenol per minute under the defined assay conditions (e.g. pH and temperature).

### Protocol (the Exemplary Polypeptide SEQ ID NO:560 is Used as an Example):

[1191] 1. Use clear 96-well plate. Position all samples for fast, simultaneous addition of reaction components and to provide the shortest interval for a kinetic read. Run all samples in duplicate. Include standard curve (in duplicate) on each plate.
[1192] 2. Standard curve preparation. Dilute 10 mM p-NP solution in 50 mM sodium phosphate buffer pH 7.0. Make at least 500 μL of each dilution: 0, 0.0625, 0.125, 0.25, 0.5, and 1.0 mM.
[1193] 3. Sample preparation. For each enzyme sample to be tested, first assay the undiluted sample. If a dilution of the sample is required, make serial dilutions in 50 mM sodium phosphate buffer pH 7.0. Prepare at least 100 μL of each dilution.
[1194] 4. Substrate preparation. To avoid substrate limitation in the enzymatic reaction, amount of pNP-β-D-glucopyranoside should be empirically determined for each enzyme which will be assayed. For example, for SEQ ID NO:560, substrate should be used at 20 mM final concentration. Final reaction volume will be 200 μL (see step 9). For each enzyme sample and each dilution to be tested prepare 190 μL solution consisted of 150 μL 50 mM sodium phosphate buffer pH 7.0 and 40 μl 100 mM pNP-β-D-glucopyranoside stock substrate (20 mM final concentration). For example, if 4 different dilutions of 2 enzyme sample will be tested in duplicate, prepare 3.8 mL of solution consisted of 3.0 mL 50 mM sodium phosphate buffer pH 7.0 and 0.8 mL 100 mM pNP-β-D-glucopyranoside solution. Preincubate solution for 5 min at 37° C. in a water bath and place into a pipetting basin immediately before dispensing it into a 96-well plate (see Step 6).
[1195] 5. Load the standard curve. Preincubate standard curve dilution samples in a water bath at 37° C. for 5 min. Load, in duplicate, at 200 μL/well onto a clear 96-well plate. Put plate on SPECTRAMAX™ tray, lid off.
[1196] 6. Load substrate. Quickly transfer the solution prepared in Step 4 into a pipetting basin and load substrate prepared in Step 4 in duplicate at 190 μL/well onto a clear 96-well plate. Put plate on SPECTRAMAX™ tray, lid off.
[1197] 7. Equilibrate at 37° C. before kinetic read: Incubate 96-well plate containing the standard curve and substrate for 1 min at 37 C before adding enzyme samples.
[1198] 8. Set up the SPECTRAMAX™. Set for kinetic read at 37 C. Choose the following SPECTRAMAX™ settings: (1) Absorbance 405 nm (A₄₀₅); (2) Timing: Take readings for total of 10 minutes with minimal allowed interval between the reads (this will depend on the number of strips which will be read on each plate); (3) Automixing & Blanking: “Automixing before the first read” should be “on”; “Automixing between reads” and “blanking before a pre-read” should be “off”; (4) “Autocalibrate once”: this function should be “on”; (5) Strips: select to read only strips where samples were loaded; (6) “Auto Read”: this function should be “off”. Make sure the standard curve samples are included in the kinetic read so that they are read under the same conditions.
[1199] 9. Add enzyme and start kinetic read. Quickly add 10 μL of each enzyme dilution (in duplicate) to the wells containing 190 μl of solution dispensed in Step 6. Use a multichannel pipet for fast, simultaneous addition and mixing of samples. Immediately start kinetic read; save data. Make sure Vmax is calculated by the program in mU per minute.

### Calculations:

### Standard Curve

[1200] 1. Use the first kinetic read to gather data for standard curve (the standard curve is just an endpoint measurement). First convert the mM values to μmole; for example, 200 μL, of 1.0 mM p-NP=0.2 μmole. For each point on the standard, calculate average and standard deviation for the duplicate samples and subtract the background from the average RFU values. Minimum of 4 data points are required to generate a reliable standard curve.
[1201] 2. Generate a scatter plot using the background-subtracted average values, with μmol p-NP on the x-axis and A₄₀₅ on the y-axis.
[1202] 3. Use linear regression to generate the line function relating A₄₀₅ to μmol p-NP present. Since background was subtracted, force y-intercept to 0. If the R-value is below 0.998, try omitting the data point representing the highest concentration on the standard curve. Nevertheless, minimum of 4 data points must be included in a standard curve. In MS EXCEL™, format the line function in scientific notation with 2 decimal points. Example of a standard curve is shown in FIG. 9A.

### Enzyme Activity

[1203] 1. For each measurement of β-glucosidase activity, use the dilution that best fits the sensitivity range of the standard curve. Within this dilution, use only the data points that fall within the linear region of the kinetic to generate the Vmax (Vmax is automatically calculated in the SPECTRAMAX™ software (in mU/min)). Calculate the average and standard deviation for each pair of duplicates. Standard deviation should be no more than 5%. Then divide the average mU/min by 1000 to get U/min.

[1204] 2. Use the line function to translate Vmax U/min value to units of β-gluc activity in μmol/min (U/min divided by slope of the standard curve), then divide that value by the volume of enzyme added to reaction in each well (0.01 mL), and finally multiply by the enzyme dilution factor to translate μmol/min value to U/mL value.

[1205] 3. To obtain specific activity in U/mg of protein divide U/ml value by the protein concentration (mg/mL).

[1206] 4. FIG. 9B shows how calculations can be set up in EXCEL™, given a standard curve slope of 25.90 (SEQ ID NO:560 and 20 mM pNP-β-D-glucopyranoside used in the assay).

### Reagents

[1207] p-NP Standard

[1208] p-nitrophenol (4-Nitrophenol) (Sigma N7660, 10 mM solution). Store at 4° C. protected from light. Make dilutions for standard curve in the buffer which will be used in the assay (e.g. 50 mM sodium phosphate pH 7.0).

pNP-β-D-Glucopyranoside Substrate (pNP-G)

[1209] pNP-β-D-glucopyranoside (FW 301.3 g/mol, Sigma N-7006). To make 10 ml of the 100 mM stock solution, weigh 0.3013 g of powder to a 15 mL conical centrifuge tube and dissolve the powder in 5.0 mL DMSO. Adjust the final volume to 10 mL with DIH₂O. Vortex the tube for several minutes to ensure solution in thoroughly mixed. Solution should be clear. If it is cloudy, heat the solution in a hot water bath and vortex gently until all material is solubilized. Aliquot and store at −20° C. protected from light.

### Protocol (the Exemplary Polypeptide SEQ ID NO:564 is Used as an Example):

[1210] This exemplary assay is for determination of β-glucosidase activity using pNP-β-D-glucopyranoside substrate at assay conditions of pH 5.0 and 37° C. Enzyme activity is described in U/mL. If the protein concentration (mg/mL) is available, this value could be used to calculate enzyme specific activity (U/mg).

[1211] 1. Use clear 96-well plate and plan to position all samples for fast, simultaneous addition of reaction components and to provide the shortest interval for a kinetic read. Run all samples in duplicate. Include standard curve in duplicate on the plate as well.

[1212] 2. Standard Curve Preparation. Dilute 10 mM p-NP solution in 50 mM sodium phosphate buffer pH 5.0. Make at least 500 μL of each of the following dilutions: 5, 2.5, 1.25, 0.625, 0.3125, 0.15625, and 0.078125 mM. Note: 1.0 mM=1.0 μmole/mL.

[1213] 3. Sample Preparation. For each enzyme sample to be tested, first assay the undiluted sample. If a dilution of the sample is required, make serial dilutions in 50 mM sodium phosphate buffer pH 5.0. For example, purified SEQ ID NO:564 should be diluted 100 fold. Prepare at least 100 uL of each enzyme dilution; 50 μl of sample will be used per reaction.

[1214] 4. Substrate preparation. Stock concentration of 100 mM is available for use. To avoid substrate limitation in the enzymatic reaction, amount of pNP-β-D-glucopyranoside should be empirically determined for each enzyme which will be assayed. For example, enzyme SEQ ID NO:564 should be assayed with 20 mM substrate. The final reaction volume for each sample to be assayed will be 1 mL.

[1215] For example, the following is required for a sample:
[1216] (i) 200 μl of 100 mM substrate.
[1217] (ii) 750 μl of 50 mM sodium phosphate buffer pH 5.0
[1218] (iii) 50 μl of diluted enzyme

[1219] 5. Quencher Plate Preparation. Since the assay is performed at pH 5.0, a quenching step is required to appropriately read absorbance. Set up a clear 96-well plate with 200 μL of 400 mM Na₂CO₃ pH 10.0 in each well. Add 50 μL of each standard dilution in duplicate in the first two columns of each assay plate.

[1220] 6. Preincubation. In a 1.5 mL Eppendorf tube, add 750 μl of buffer and 50 μl of enzyme and incubate at 37° C. for 5 minutes. Separately, incubate substrate at 37° C. also.

[1221] 7. Starting the reaction. Use a timer and take aliquots of the sample at the following time points: 0, 2, 4, 8, 18, 28, 38, and 48 minutes. To initiate the reaction, add 200 μl of substrate in the reaction tube containing buffer and enzyme. Mix thoroughly and immediately take 50 μl aliquots and add to quencher plate in duplicate for the first timepoint, t=0 mins. Do the same at each time point. When a time point is taken, immediately replace the reaction tube at 37° C. Observe the color change in the quencher plate for all time points.

[1222] 8. Set up the SpectraMax. Set for Endpoint read at 37° C. Choose the following SpectraMax settings: (1) Absorbance 405 nm (A₄₀₅); (2) Strips: select to read only strips where samples were loaded. Load plate onto the machine and hit Read. Save data once read is complete.

### Calculations

### Standard Curve

[1223] 1. Use the endpoint read to gather data for calculating a standard curve. First convert p-NP dilutions (mM) to p-NP in μmole by multiplying with 0.05 (volume added into quencher plate); for example, 0.05 mL of 1.0 mM p-NP=0.05 μmole. For each standard dilution, calculate average and standard deviation for the duplicate samples and subtract the background from the average absorbance values. A minimum of 4 data points are required to generate a reliable standard curve.

[1224] 2. Generate a scatter plot using the background-subtracted average values, with μmol p-NP on the x-axis and A₄₀₅ on the y-axis.

[1225] 3. Use the linear regression trend line to generate the straight-line function relating A₄₀₅ to μmol p-NP present. Since background was subtracted, force y-intercept to 0. If the R-value is below 0.998, try omitting the data point representing the highest concentration on the standard curve. Nevertheless, minimum of 4 data points must be included in a standard curve. In MS Excel, format the line function in scientific notation with 2 decimal points. Example of a standard curve is shown in FIG. 10A.

### Calculating Enzyme Specific Activity

[1226] For the measurement of β-glucosidase activity, use the dilution that best fits the sensitivity range of the standard curve. Use the endpoint read to gather data for calculating specific activity for each enzyme.

[1227] 1. For each enzyme dilution, at each timepoint, calculate average and standard deviation for the duplicate samples and subtract the background (absorbance at time point 0 min) from the average absorbance values. Standard deviation should be no more than 5%. An absorbance above 1.00 should not be used in calculations, as it does not lie in the reliable range of absorbance data. Again, a minimum of 4 data points are required to generate a reliable reaction rate curve.

[1228] 2. Generate a scatter plot using the background-subtracted average values, with time in minutes on the x-axis and A₄₀₅ on the y-axis.

[1229] 3. Use the linear regression trend line to generate the straight-line function relating A₄₀₅ over a 48 minute time course. Since background was subtracted, force y-intercept to 0. If the R-value is below 0.998, try omitting the data point that may be an outlier.

[1230] 4. Then create a table, as shown below:
[1231] a. Slope [Δ Abs/min]−reaction rate
[1232] b. Final dilution of enzyme−initial enzyme dilution*(100)
[1233] c. Volume of enzyme added to reaction−0.05 mL
[1234] d. Slope ratio [μmole/min]−(slope of reaction rate/slope of standard curve)
[1235] e. Enzyme activity [U/mL]−(slope ratio/vol. enzyme in reaction)*dilution factor
[1236] f. Protein Concentration [mg/mL]−values from A₂₈₀ scan
[1237] g. Specific Activity [U/mg]−(enzyme activity/protein concentration)

[1238] 5. FIG. 10B shows how calculations can be set up in EXCEL™, given a standard curve slope of 256.91 (SEQ ID NO:564—100× and 20 mM pNP-β-D-glucopyranoside used in the assay).
[1239] The standard curve and the endpoint absorbances should be measured on the SpectraMax together in the same read so that the sensitivity between the standard and sample is matched.
[1240] Determine target range for p-NP to get linear absorbance. Always make fresh dilutions of the p-NP standard.
[1241] Use the same buffer pH 5.0 for the standard curve and the sample measurements. p-NP is highly sensitive to changes in temperature and pH.

### Reagents

[1242] p-NP Standard

[1243] p-nitrophenol (4-Nitrophenol) (Sigma N7660, 10 mM solution). Store at 4° C. protected from light. Make dilutions for standard curve in the buffer which will be used in the assay (e.g. 50 mM sodium phosphate pH 5.0).

pNP-β-D-Glucopyranoside Substrate (pNP-G)

[1244] pNP-β-D-glucopyranoside (FW 301.3 g/mol, Sigma N-7006). To make 10 ml of the 100 mM stock solution, weigh 0.3013 g of powder to a 15 mL conical centrifuge tube and dissolve the powder in 5.0 mL DMSO. Adjust the final volume to 10 mL with distilled water (DIH₂O). Vortex the tube for several minutes to ensure solution in thoroughly mixed. Solution should be clear. If it is cloudy, heat the solution in a hot water bath and vortex gently until all material is solubilized. Aliquot and store at −20° C. protected from light.

### β-Glucosidase Evaluation

[1245] Sixty seven beta-glucosidases were partially characterized; 36 of these enzymes of this invention were further evaluated based on the following criteria: (1) activity on cellobiose and on fluorescent substrate 4-methylumbelliferyl beta-D-glucopyranoside (4-MU-GP) at pH5 and 7 and T=37-90 C; (2) expression in heterologous hosts; (3) residual activity at T=60-80 C, pH5; and (4) level of product inhibition. Eight (8) beta-glucosidases of this invention were identified based on the multiple selection criteria: including the exemplary polypeptides of this invention SEQ ID NO:556, SEQ ID NO:566, SEQ ID NO:530, SEQ ID NO:548, SEQ ID NO:564, SEQ ID NO:560, SEQ ID NO:586, and SEQ ID NO:558.
[1246] His-tag versions of these beta-glucosidases of this invention were generated and produced in E. coli by batch fermentation. Protein purification was completed for five (5) exemplary enzymes of this invention. Absorbance based activity assay using pNP-beta-D-glucopyranoside substrate (pNP-G) was developed and used to determine specific activity of exemplary enzymes of this invention. Megazyme I A. niger beta-glucosidase was used as benchmark in all experiments. Several enzymes had specific activities significantly higher than the commercial benchmark under chosen assay conditions.
[1247] To complete selection of beta-glucosidases which will be most suitable for use in multi-enzyme cocktails, product inhibition and residual activity at T=60-80 C can be determined for beta-glucosidases of this invention with high specific activities.

[1248] Characterization of Beta-Glucosidases

[1249] Introduction: The main objectives of this work were the following: (1) Identify β-glucosidase enzymes of this invention for use in a four enzyme cocktail which will be designed to meet MS1 criteria; (2) Identify several enzymes which could be used in a combinatorial assay.

[1250] Sixty seven beta-glucosidases were partially characterized. 36 of these enzymes were further evaluated based on the following criteria: (1) activity on cellobiose and on fluorescent substrate 4-methylumbelliferyl beta-D-glucopyranoside (4-MU-GP) at pH5 and 7 and T=37-90 C; (2) expression in heterologous hosts; (3) residual activity at T=60-80 C, pH5; and (4) level of product inhibition. The following 81 beta-glucosidases of this invention were identified based on multiple selection criteria: the exemplary polypeptides of the invention SEQ ID NO:556, SEQ ID NO:566, SEQ ID NO:530, SEQ ID NO:548, SEQ ID NO:564, SEQ ID NO:560, SEQ ID NO:586, and SEQ ID NO:558.

[1251] To enhance protein purification, His-tag versions of all exemplary beta-glucosidases of this invention (SEQ ID NO:556, SEQ ID NO:566, SEQ ID NO:530, SEQ ID NO:548, SEQ ID NO:564, SEQ ID NO:560, SEQ ID NO:586, and SEQ ID NO:558) were generated. Expression was evaluated in shake-flasks and optimal induction conditions were transferred to fermentation protocols. The exemplary enzymes were produced by batch fermentation (10 L scale), material was recovered and proteins were purified by the FPLC method. Protein concentration was determined by several methods, including Bradford assay, gel-densitometry and absorbance at A₂₈₀. Absorbance based activity assay using pNP-beta-D-glucopyranoside substrate (pNP-G) was developed. This assay was used to determine specific activity of beta-glucosidases of this invention. Commercial A. niger beta-glucosidase was used as benchmark in all experiments. To complete selection of beta-glucosidases which best fit the objectives outlined above, product inhibition and residual activity at T=60-80 C will be determined using purified protein preparations of enzymes of this invention with high specific activities.

[1252] Methods/Results:

[1253] (1) Protein Expression, Production, and Purification.

[1254] His-tag versions of all enzymes of this invention were generated by site-directed mutagenesis which removed a stop codon between the ORF and C′-terminal 6×-His tag in pSE420 vector in original subclones.

[1255] All enzymes except SEQ ID NO:558 were expressed in E. coli host (strains GAL631 and Rosetta Gami) and produced by 10 L batch fermentation. Several of these proteins were expressed in both soluble and insoluble fractions and were recovered from both supernatants (S) and cell pellets (P) after extensive troubleshooting. Designations “S” and “P” will be used next to relevant in the following sections where protein purification and activity assays will be presented. Expression of all enzymes of this invention was also evaluated in Pichia pastoris ×33 host (vectors pPICZα and pGAPα). All subclones produced soluble proteins, but expression and activities were too low to permit use of Pichia-produced material in enzyme characterization. SEQ ID NO:558 was originally generated in Pichia pastoris ×33 and showed good expression (35% purity), but also high level of product inhibition. His-tag version of SEQ ID NO:558 showed little expression in Pichia and was not further characterized.

[1256] FPLC protein purification was completed for 5 of 7 enzymes of this invention which were produced in E. coli (SEQ ID NO:548, SEQ ID NO:564, SEQ ID NO:560, SEQ ID NO:530 and SEQ ID NO:566). His-tagged enzyme constructs were used and 1 gram of lyophilized powder of each was resuspended in 10.0 mL of Buffer A. (20 mM Tris-HCl, 500 mM NaCl, pH8.0) and dialyzed in the same buffer overnight. Following dialysis, the 10 mL of each sample was loaded onto a HISTRAP™ 5 mL column and eluted using the HISTRAP™ 5 mL protocol. The HISTRAP™ method calls for washing the unbound protein with 5 column volumes of Buffer A and eluting the bound proteins over 20 column volumes using a linear gradient of Buffer B (20 mM Tris, 500 mM NaCl, 1 M imidazole, pH8.0). A flow rate of 2 mL/min was maintained during the procedure and 1 mL elution fractions were collected in 96-deep well plates. Based on the FPLC data, optimal fractions, those lying under the chromatogram peaks, were selected to test for enzyme activity and expression/purity. Activity was tested using the 4-MU-GP fluorescent assay. Selected fractions were also run on PAGE gels to test for purity

[1257] Summary of fermentation recovery and protein purification efforts is shown in Table 1. All of these exemplary enzymes of this invention were generated in enough quantities (“total lyophilized powder” and “expected mg of purified protein in 1 g of powder and in total lot”) to allow in-depth biochemical characterization of relevant enzymes.

[1258] Table 1, illustrated as FIG. 11, shows data from the production and purification summary for beta-glucosidase enzymes of this invention.

[1259] (2) Determination of Protein Concentration.

[1260] Three methods were used to determine concentration of purified proteins, Bradford assay, gel densitometry and absorbance at A₂₈₀ nm. All FPLC-purified proteins were dialyzed in 50 mM NaPi pH 7.0 before activity characterization. Results are summarized in the table of FIG. 11.

[1261] The Bradford colorimetric assay measures protein absorbance at 595 nm. Purified protein samples were added to assay dye reagent, color change was observed, and absorbance at 595 nm was read. BSA protein standard was used at 0.05, 0.1, 0.2, 0.3, 0.4, and 0.5 mg/mL to determine the unknown concentrations. Protein concentrations of enzymes are extrapolated from a ‘line-of-best fit’ linear curve generated with BSA standards.

[1262] To evaluate protein purity and to determine concentration by gel densitometry, 5 μL of enzyme was loaded per lane on 4-12% Tris-Glycine PAGE gel (Invitrogen) and electrophoresis was performed in 2× MES buffer at 200 V for 50 min. Amount of protein loaded for each sample is noted below. BSA protein standard (Pierce) was loaded on all gels in 0.25, 0.50, 1.00, 1.50, and 2.00 μg total quantities per lane. Gels were scanned using ALPHAIMAGER® software and protein concentrations were determined based on the BSA standard curves.

[1263] FIG. 12A: PAGE electrophoresis of SEQ ID NO:548, SEQ ID NO:564, and SEQ ID NO:560 purified from supernatant and pellet cell fractions by the FPLC method:

[1264] Lane 1—SeeBlue® marker Plus Two ladder Invitrogen)

[1265] Lane 2—SEQ ID NO:548 (P)—0.07 μg

[1266] Lane 3—SEQ ID NO:548 (S)—0.12 μg

[1267] Lane 4—SEQ ID NO:564 (P)—0.23 μg

[1268] Lane 5—SEQ ID NO:564 (S)—0.41 μg

[1269] Lane 6—SEQ ID NO:560 (P)—0.54 μg

[1270] Lane 7—SEQ ID NO:560 (S)—0.37 μg

[1271] Lane 8—BSA standard—2.0 μg

[1272] Lane 9—BSA standard—1.5 μg

[1273] Lane 10—BSA standard—1.0 μg

[1274] Lane 11—BSA standard—0.50 μg

[1275] Lane 12—BSA standard—0.25 μg

[1276] FIG. 12B: PAGE electrophoresis of SEQ ID NO:530 and SEQ ID NO:566 purified from supernatant and pellet cell fractions by the FPLC method:

[1277] Lane 1—SeeBlue marker Plus Two ladder (Invitrogen)

[1278] Lane 2—SEQ ID NO:530 (P)—0.18 μg

[1279] Lane 3—SEQ ID NO:530 (S)—0.12 μg

[1280] Lane 4—N/A

[1281] Lane 5—SEQ ID NO:566 (S)—0.07 μg

[1282] Lane 6—N/A

[1283] Lane 7—BLANK

[1284] Lane 8—BSA standard—2.00 μg

[1285] Lane 9—BSA standard—1.50 μg

[1286] Lane 10—BSA standard—1.00 μg

[1287] Lane 11—BSA standard—0.50 μg

[1288] Lane 12—BSA standard—0.25 μg

[1289] When absorbance at A₂₈₀ nm was used to determine protein concentration, 1 mL of material shown in Table 1, illustrated as FIG. 11, was placed in a quartz cuvette and scanned at A₂₀₀-A₃₂₀ nm at 5 nm range. The A₂₈₀ values and molar extinction coefficients (εₘ), which were determined based on individual amino acid sequences using Vector NTi software, were used to calculate protein concentration (C=mg/mL; C=(A₂₈₀×MW/(εₘ)); MW=protein molecular weight). Ratio A₂₆₀/A₂₈₀ was calculated and used to estimate protein purity (ratio approximately 0.5 to 0.7 is expected for highly pure proteins). *Samples shown in Table 1 (FIG. 11) were concentrated.

[1290] Table 2, illustrated as FIG. 13, shows protein concentrations of purified Beta-glucosidases determined by the three different methods:

[1291] Values (mg/mL) obtained with the three independent methods described above were in agreement for most of the samples, especially when numbers determined by gel densitometry and absorbance at A₂₈₀ were compared. Since these three methods use different parameters to estimate protein concentration, and given that Bradford assay tends to over-estimate it, mg/mL values determined by absorbance at A₂₈₀ will be used for calculation of protein specific activity.

[1292] (3) Determination of Beta-Glucosidase Specific Activity.

[1293] Absorbance based activity assay using pNP-beta-D-glucopyranoside substrate (pNP-G) was developed and used to determine specific activity of enzymes of this invention. One unit of activity is defined as the quantity of enzyme required to liberate one μmole of p-Nitrophenol per minute under defined assay conditions. Enzyme activity is described in U/mL. When protein concentration (mg/mL) is known, enzyme specific activity (U/mg) could be determined using these values.

[1294] For thorough activity testing, purified protein preparations were diluted in serial fashion and incubated at pH 7 for 10 min with 20 mM pNP-G at T=37° C. Commercial A. niger beta-glucosidase was used as benchmark. Standard curves were generated using 10 mM p-Nitrophenol (p-NP) diluted in 50 mM Na-phosphate buffer pH 7 to 0.0625, 0.125, 0.25, 0.5 and 1 μmole/mL. Enzyme loading was adjusted to obtain absorbance which will remain within linear range of the p-NP standard curve in the detection assay. Enzyme activity was determined and expressed in U/mL. Protein concentration determined by absorbance at A₂₈₀ was used to calculate specific activity. Results summary is shown in Table 3, illustrated as FIG. 14.

[1295] Under chosen assay conditions, four of the five enzymes characterized to date showed specific activities higher than a commercial benchmark (Table 3/FIG. 14). SEQ ID NO:548 and SEQ ID NO:560 exhibited specific activities about 4-5-fold higher compared to the benchmark. SEQ ID NO:564 and SEQ ID NO:530 outperformed the benchmark approximately 15-fold. No significant difference was observed when enzymes were purified from soluble or insoluble cell fractions. The pNP-G assay was run at pH 7 for practical reasons, given that beta-glucosidases of the invention show activity over broad pH spectrum. However, since A. niger beta-glucosidases shows optimal activity at lower pH, specific activity comparison will be repeated at pH 5. *Sample shown in Table 1 was concentrated.

[1296] Table 3, or FIG. 14, shows the specific activities of purified beta-glucosidases of this invention.

### Summary

[1297] Five beta-glucosidase enzymes of this invention were produced by batch fermentation and proteins were purified by the FPLC method. Protein concentration was determined by several methods, including Bradford colorimetric assay, gel-densitometry and absorbance at A₂₈₀. Specific activity was determined for the five beta-glucosidases of this invention and compared to a commercial prep of A. niger beta-glucosidase, which was purchased from Megazyme and used as a benchmark.

[1298] Four of five enzymes characterized up to date outperformed the commercial benchmark under chosen assay conditions (Table 3). Two of these enzymes (SEQ ID NO:564 and SEQ ID NO:530) exhibited specific activities about 15-fold higher than the benchmark. SEQ ID NO:548 and SEQ ID NO:560 exhibited specific activities about 4-5-fold higher when compared to the benchmark. Non-His tag versions of SEQ ID NO:564, SEQ ID NO:548, and SEQ ID NO:530 (SEQ ID NO:564, SEQ ID NO:548, and SEQ ID NO:530) showed product inhibition in the presence of 500, 400 and 200 mM glucose, respectively, when semi-purified proteins were evaluated on cellobiose substrate.

[1299] Accurate determination of protein concentration proved to be quite challenging. However, values (mg/mL) obtained with the three independent methods used in this study were in agreement for most of the samples, especially when numbers determined by gel densitometry and absorbance at A₂₈₀ were compared (Table 2). Since the three methods use different parameters to estimate protein concentration, and given that Bradford assay tends to over-estimate it, mg/mL values determined by absorbance at A₂₈₀ were used for calculation of protein specific activity.

Further Characterization of Beta-Glucosidases of this Invention

[1300] The main objectives of the studies described in this example were: (1) Identify exemplary β-glucosidase enzymes of this invention for use in multi-enzyme cocktails which will be designed to effectively degrade cellulose component of pretreated sugar cane bagasse; (2) Identify several enzymes of this invention to use in high-throughput combinatorial assays.

[1301] Sixty seven (67) beta-glucosidases were partially characterized, and 36 of these enzymes were further evaluated based on the following criteria: (1) activity on cellobiose and on fluorescent substrate 4-methylumbelliferyl beta-D-glucopyranoside (4-MU-GP) at pH5 and 7 and T=37-90 C; (2) expression in heterologous hosts; (3) residual activity at T=60-80 C, pH5; and (4) level of product inhibition by glucose. The following 8 enzymes of this invention were identified based on multiple selection criteria: the exemplary enzymes of this invention SEQ ID NO:556, SEQ ID NO:566, SEQ ID NO:530, SEQ ID NO:548, SEQ ID NO:564, SEQ ID NO:560, SEQ ID NO:586, and SEQ ID NO:558.

[1302] To enhance protein purification, His-tag versions of the 8 exemplary enzymes of this invention were generated and produced in E. coli by batch fermentation (10 L scale). Protein purification was successfully completed for 5 of 8 exemplary enzymes of this invention (SEQ ID NO:548, SEQ ID NO:564, SEQ ID NO:560, SEQ ID NO:566, and SEQ ID NO:530) and specific activity at pH7 was determined using absorbance based activity assay and pNP-beta-D-glucopyranoside substrate (pNP-G). Commercial A. niger beta-glucosidase was used as benchmark. Four enzymes were identified which showed specific activities at pH 7 significantly higher than the commercial benchmark (the exemplary enzymes of this invention SEQ ID NO:548, SEQ ID NO:564, SEQ ID NO:560 and SEQ ID NO:530).

[1303] Additional biochemistry characterization was performed with 5 exemplary enzymes of this invention, beta-glucosidases, to select final candidates which are suitable for use in multi-enzyme cocktails and in high-throughput combinatorial assays. Specific activity at pH 5, product inhibition in the presence of glucose (0 to 2M), residual activity at 60° C., and pH profile (specific activity at pH 4 to 8) were determined as described herein.

[1304] Methods/Results:

[1305] (1) Determination of Beta-Glucosidase Specific Activity at pH 5.

[1306] Absorbance based activity assay using pNP-beta-D-glucopyranoside substrate (pNP-G) was developed and used to determine specific activity of exemplary enzymes of this invention. One unit of activity is defined as the quantity of enzyme required to liberate one mole of p-Nitrophenol per minute under defined assay conditions. Enzyme activity is described in U/mL. When protein concentration (mg/mL) is known, enzyme specific activity (U/mg) could be determined using these values.

[1307] For thorough activity testing, purified protein preparations were diluted in serial fashion in 50 mM Na-phosphate buffer pH 5 and incubated with 20 mM pNP-G (1 mL total reaction volume) at T=37° C. for 48 min. 50 μl aliquots were taken at time points 0, 2, 4, 8, 18, 28, 38 and 48 min and added to a quencher 96-well plate containing 200 μl of 400 mM Na₂CO₃ pH 10 in each well. Commercial A. niger beta-glucosidase was used as benchmark. Standard curves were generated using 10 mM p-Nitrophenol (p-NP) diluted in 50 mM Na-phosphate buffer pH 5 to 0.015625, 0.03125, 0.0625, 0.125, 0.25, 0.5 and 1.0 μmole/mL. Absorbance was measured at 405 nm (end-point read). Enzyme loading was adjusted to obtain absorbance which will remain within linear range of the p-NP standard curve in the detection assay. Enzyme activity was determined and expressed in U/mL. Protein concentration determined by absorbance at A₂₈₀ was used to calculate specific activity. Results are summarized in Table 1, illustrated as FIG. 15.

[1308] Two of five selected enzymes of the invention (SEQ ID NO:564 and SEQ ID NO:530) exhibited higher specific activities at pH 5 compared to A. niger beta-glucosidase. The other 3 exemplary enzymes of this invention had lower specific activities at pH 5 compared to benchmark (Table 1/FIG. 15).

[1309] Table 1, illustrated as FIG. 15, shows the specific activity of exemplary beta-glucosidases of this invention.

[1310] (2) Product Inhibition in the Presence of Glucose.

[1311] The objective of this work was to evaluate beta-glucosidases of this invention for levels of product inhibition and enzyme activity in the presence of various concentrations of glucose. Glucose was dosed at 0 to 300 mM (“low dose”) and 0 to 2 M (“high dose”) and specific activity on p-NPG substrate was determined as described in the previous section (48 min reactions at 37° C. and pH 5). Glucose concentrations were chosen based on process assumptions (hydrolysis at 20% solids) and previous results obtained in product inhibition experiments performed with semi-purified enzymes. For each enzyme, specific activity in the absence of glucose was designated as 100%.

[1312] All 5 exemplary enzymes of this invention retained activity at pH 5 in the presence of all glucose concentrations evaluated in this experiment and significantly outperformed A. niger benchmark. In a commercial process which would assume hydrolysis of bagasse (approximately 50% cellulose content) at 20% solids and 50% enzymatic conversion, approx. 280 mM glucose (50 g/L) would be generated from 1 kg of starting material (equivalent of a “low-dose” evaluated in this experiment). All 5 exemplary enzymes of this invention tested in this study retained ≧50% activity in the presence of 300 mM glucose, compared to <25% retained by the commercial benchmark. Similar trend was observed in the presence of higher glucose concentrations. For example, accumulation of ≧1M glucose would be expected in a process that would run at ≧50% solids which would be very difficult to achieve in practice. However, even under such harsh conditions, all 5 exemplary enzymes of this invention retained ≧20% activity while commercial benchmark retained <5% activity.

[1313] Increase in specific activity of SEQ ID NO:560 and SEQ ID NO:566 in the presence of glucose was repeatedly observed in multiple experiments. This phenomenon is not understood, and it will not be further investigated at this time.

[1314] (3) Residual Beta-Glucosidase Activity at 60° C.

[1315] Four (4) exemplary beta-glucosidases of this invention (SEQ ID NO:548, SEQ ID NO:564, SEQ ID NO:560 and SEQ ID NO:530) and commercial A. niger beta-glucosidase were incubated for 0-4 hours at 60° C. at pH 5 (1 mL reaction volume, 300 rpm mixing). Aliquots were removed at every hour and assayed for residual enzyme activity on p-NPG substrate as described in Section (1) of this Report. For each enzyme, specific activity at Time=0 h was designated as 100%.

[1316] 3 of 4 tested enzymes (SEQ ID NO:548, SEQ ID NO:564 and SEQ ID NO:530) showed significant loss of activity after exposure to 60° C. for extended periods of time (≧2 h). These enzymes lost ≧50% activity after 4 h at 60° C., while commercial benchmark retained about 70% activity. This finding is contradictory to previous results generated with crude protein preparations (lyophilized bacterial lysates) assayed on cellobiose and on fluorescent substrate. When assayed as crude enzymes (protein of interest present ≦10% total protein), all 4 enzymes retained ≧90% activity after 4 h at 60 C. It is possible that residual host proteins could provide some stabilization effect at elevated temperatures. However, this finding further emphasizes the need to generate purified protein preparations in order to perform meaningful enzyme characterization.

[1317] (4) Determination of pH Profile of Exemplary Beta-Glucosidases.

[1318] Specific activity of five (5) exemplary enzymes of this invention, the beta-glucosidases SEQ ID NO:548, SEQ ID NO:564, SEQ ID NO:560, SEQ ID NO:566, and SEQ ID NO:530, and commercial A. niger beta-glucosidase was determined on p-NPG substrate at pH 4, 5, 6, 7, and 8. Assays performed at pH 4 and 5 were run as described above, except that 50 mM Na-phosphate buffer was adjusted to pH 4 and 5. Assays performed at pH 6, 7, and 8 were run as described above. Briefly, purified protein preparations were diluted in serial fashion and incubated at pH 6, 7, and 8 for 10 min with 20 mM pNP-G at T=37° C. Commercial A. niger beta-glucosidase was used as benchmark. Standard curves were generated using 10 mM p-Nitrophenol (p-NP) diluted in 50 mM Na-phosphate buffer pH 6, 7, and 8 to 0.0625, 0.125, 0.25, 0.5 and 1 μmole/mL. Enzyme loading was adjusted to obtain absorbance which will remain within linear range of the p-NP standard curve in the detection assay. Enzyme activity was determined and expressed in U/mL. Protein concentration determined by absorbance at A₂₈₀ was used to calculate specific activity (U/mg). Specific activities determined over a pH 4-8 range are summarized in Table 2, below.

[1319] Based on the specific activities retained over a pH 4-8 range, all of the tested exemplary beta-glucosidases of this invention outperformed the benchmark. SEQ ID NO:564 and SEQ ID NO:530 show strong pH 5 optimum (Table 2, below) and a narrow pH profile (14-18% specific activity retained at pH6 and 11% specific activity retained at pH7). Benchmark enzyme shows strong pH 4-5 optimum and retains only 5% specific activity at pH 6 and 1% specific activity at pH7. SEQ ID NO:548, SEQ ID NO:560 and SEQ ID NO:566 show pH 4-5 profile more similar to the benchmark than to SEQ ID NO:564 and SEQ ID NO:530.

TABLE 2
Specific activity of beta-glucosidases and benchmark at pH 4-8:

| | pH | | | | |
|---|---|---|---|---|---|
| Enzyme | 4 | 5 | 6 | 7 | 8 |
| SEQ ID NO: 548 | 45.60 | 40.64 | 8.88 | 6.70 | 4.87 |
| SEQ ID NO: 564 | 162.14 | 416.03 | 57.97 | 44.52 | 35.41 |
| SEQ ID NO: 560 | 88.74 | 101.79 | 13.83 | 10.98 | 7.93 |
| SEQ ID NO: 530 | 159.47 | 274.59 | 50.29 | 30.11 | 12.69 |
| SEQ ID NO: 566 | 8.04 | 11.43 | 1.93 | 0.99 | 0.45 |
| A. niger β-gluc. | 177.69 | 163.72 | 9.45 | 1.78 | 0.66 |

[1320] Summary:

[1321] Selection of beta-glucosidases of this invention which in some embodiments and applications may the most suitable for use in multi-enzyme cocktails was completed. Five exemplary enzymes of this invention were selected were further characterized to determine their specific activity at pH 5, product inhibition in the presence of glucose (0-2M), residual activity at 60 C, and pH profile (specific activity at pH 4-8).

[1322] Selected enzymes of this invention strongly outperformed commercial benchmark (Megazyme A. niger beta-glucosidase) by all parameters considered, with the exception of residual activity after extended exposure to high temperatures (4 h at 60° C.). These enzymes show high specific activities at pH 5 and little product inhibition by glucose. Selected exemplary enzymes of this invention retain activity over a broad pH range and could be used in a variety of applications. Characterization summary of several beta-glucosidases is shown in Table 3, below:

TABLE 3
Characterization summary

| | SA at | SA at | % Activity | pH | % Res. |
|---|---|---|---|---|---|
| | pH5 | pH7 | (0.3 M | optima/ | activity (4 h |
| Enzyme | (U/mg) | (U/mg) | gluc.) | range | at 60° C.) |
| SEQ ID NO: 564 | 416 | 45 | 76 | 5/4-8 | 17 |
| SEQ ID NO: 530 | 275 | 30 | 50 | 5/4-8 | 25 |
| SEQ ID NO: 560 | 102 | 11 | >100 | 4-5/4-8 | 90 |
| A. niger | 164 | 2 | 18 | 4-5/4-6 | 70 |

SA, specific activity; Numbers shown in Table 1 and 2 rounded to 0 decimals.

[1323] Summary of Selected Beta-Glucosidase Studies

| Enzyme | | | | |
|---|---|---|---|---|
| (Nucleotide SEQ ID | | | His-tag | |
| NO:, amino acid | Selected for | Primary | version | Secondary |
| SEQ ID NO:) | characterization | hits | created | hits |
| 537, 538 | X | | | |
| 555, 556 | X | X | X | |
| 535, 536 | X | | | |
| 539, 540 | X | | | |
| 545, 546 | X | | | |
| 565, 566 | X | X | X | X |
| 549, 550 | X | | | X |
| 529, 530 | X | X | X | |
| 541, 542 | X | | | |
| 543, 544 | X | | | |
| 553, 554 | X | | | |
| 547, 548 | X | X | X | X |
| 563, 564 | X | X | X | X |
| 525, 526 | X | | | |
| 531, 532 | X | | | |
| 551, 552 | X | | | |
| 561, 562 | X | | | |
| 589, 590 | X | | | |
| 559, 560 | X | X | X | X |
| 591, 592 | X | | | |
| 527, 528 | X | | | |
| 533, 534 | X | | | |
| 567, 568 | X | | | |
| 593, 594 | X | | | |
| 595, 596 | X | | | |
| 571, 572 | X | | | |
| 583, 584 | X | X | | |
| 585, 586 | X | X | X | |
| 587, 588 | X | | | |
| 569, 570 | X | | | |
| 581, 582 | X | | | |
| 577, 578 | X | | | |
| 573, 574 | X | | | |
| 575, 576 | X | | | |
| 557, 558 | X | | X | |
| 579, 580 | X | | | |

### Example 15

### Characterization of Beta-Glucosidases of this Invention

[1324] The main objective of this work was to characterize exemplary β-glucosidases of this invention to identify the most suitable enzyme(s) which could be included in a 4-enzyme cocktail. Enzyme activity and residual stability at higher temperatures, good specific activity, and low or no product inhibition, were chosen as main selection criteria for ranking enzyme candidates. Sixty seven enzymes β-glucosidase collection were evaluated at different pH and temperatures using surrogate fluorescent substrate (pNP-B-Glucopyranoside). Fourteen enzymes of the invention were identified as best performers and selected for more detailed evaluation on cellobiose substrate. Ten of these enzymes have been evaluated to date. Semi-pure protein preparations from subclone fermentations were used in the analysis which involved (1) determination of enzyme activity under different pH and temperature conditions, (2) semi-quantitative analysis of specific-activity, and (3) determination of residual activity at temperatures up to 80° C. Analysis was carried out with several enzyme doses and substrate concentrations, and at pH and temperature conditions described in the following sections. Time points were taken over 0.5 h-4 h reaction times and the amount of released glucose was measured with the AMPLEX RED® glucose oxidase assay. PAGE (polyacrylamide gel electrophoresis) was carried out to estimate amount of proteins used in reactions.

[1325] Methods/Results:

[1326] (1) Activity of Beta-Glucosidases at pH 5 and pH 7 and at Temperature Range Between 37° C. and 90° C.

[1327] Semi-pure lyophilized protein preparations from subclone fermentations were reconstituted in 50% glycerol to obtain 25 mg/ml total protein concentration. Protein preps were subsequently diluted 40-fold (empirically determined to avoid enzyme inhibition by glycerol) and used in the reactions which were run for 1 hour at pH 5 and pH 7 and at 37, 40, 50, 60, 70, 80, and 90° C. 2 mM cellobiose substrate was used. Reaction volume was 50 μl (substrate and enzyme present at 1:1 ratio). The following 10 enzymes were evaluated in this experiment: SEQ ID NO:556, SEQ ID NO:566, SEQ ID NO:542, SEQ ID NO:548, SEQ ID NO:564, SEQ ID NO:532, SEQ ID NO:560, SEQ ID NO:592, SEQ ID NO:586, and SEQ ID NO:576. Results are shown in FIG. 18.

[1328] FIG. 18 illustrates data showing the hydrolysis of 2 mM cellobiose at different temperatures at pH 5 using exemplary enzymes of this invention.

[1329] FIG. 19 illustrates data showing the hydrolysis of 2 mM cellobiose at different temperatures at pH 7 using exemplary enzymes of this invention.

[1330] The following was concluded based on the results obtained in this experiment:

[1331] (1) Most of the tested exemplary enzymes of this invention performed better at pH 5 than at pH 7;

[1332] (2) Several exemplary enzymes of this invention showed strong activity at pH 5 over the range of temperatures (SEQ ID NO:556, SEQ ID NO:566, SEQ ID NO:542, SEQ ID NO:548, and SEQ ID NO:560) and were selected for more detailed analysis;

[1333] (3) SEQ ID NO:556 remained very active at all temperatures and SEQ ID NO:560 was active up to 90° C.;

[1334] (4) Temperature 60° C. and pH5 were selected as reaction conditions for future experiments to mimic reaction conditions these enzymes will encounter in a 4-enzyme cocktail.

[1335] (2) Semi-Quantitative Determination of Specific Activity of Selected Beta-Glucosidases of this Invention.

[1336] Accurate determination of specific activity was not practical since semi-pure protein preparations were used in experiments described here (purified proteins were not available for this initial screen). To determine specific activity in a semi-quantitative manner, multiple dilutions were prepared for each of the selected enzymes and cellobiose digestion was performed for 16 min at pH 5 and 60° C. using 10 mM substrate (amount determined empirically to avoid substrate limitation). Reaction volume was 50 μl (substrate and enzyme present at 1:1 ratio). The objective was to achieve comparable rate kinetics for all enzymes at selected reaction conditions. PAGE was run in parallel to estimate amount of beta-glucosidases in each protein preparation. Enzyme with the least amount of protein in the prep (most diluted) and having the rate comparable to others was considered to have the best specific activity under test conditions.

[1337] Megazyme beta-glucosidase (pure protein prep) was also evaluated in these experiments although direct comparison with exemplary beta-glucosidases of the invention could not be made given that enzymes of the invention used in this study were not purified. Results of this experiment are shown in FIG. 16 (cellobiose digestion) and FIG. 17 (PAGE electrophoresis).

[1338] FIG. 16: illustrates data of the initial rate kinetics with enzyme dilutions selected empirically for each tested beta-glucosidase enzyme of this invention.

[1339] FIG. 17: illustrates a PAGE electrophoresis with the exemplary SEQ ID NO:556, SEQ ID NO:560 of this invention, and A. niger beta-glucosidase. Equivalent of 1 μl of each sample was loaded in each lane. Arrows indicate protein bands corresponding to beta-glucosidase enzymes in each sample.

[1340] The following can be concluded based on the results obtained in this experiment:

[1341] (1) SEQ ID NO:556 and SEQ ID NO:560 performed the best of all tested beta-glucosidase enzymes of this invention (had initial rates at highest enzyme dilutions comparable to rates obtained with other enzymes used at lower dilutions);

[1342] (2) Based on a semi-quantitative analysis shown here, SEQ ID NO:556 and SEQ ID NO:560 had very comparable specific activities. According to PAGE electrophoresis data shown for these two enzymes, similar amount of each of the enzymes was present in protein preps used in the reaction. When gel shown on FIG. 17 was subjected to densitometry scan it was determined that approx. 1 mg/ml SEQ ID NO:556 enzyme and 0.7 mg/ml SEQ ID NO:560 enzyme were present in the corresponding protein preps diluted 10-fold for gel loading (1.5-fold more beta-glucosidase protein was present in SEQ ID NO:556 prep than in SEQ ID NO:560 prep); Since SEQ ID NO:556 was diluted 1.5-fold higher than SEQ ID NO:560 in cellobiose digestion reaction to achieve comparable reaction rates (1,200-fold vs. 800-fold, 25 μl volume used for each enzyme in 50 μl reaction volume), specific activities for these two enzymes appear very similar. BSA standard at concentrations listed in FIG. 16 was used for calibration in densitometry scan.

[1343] (3) Amount of beta-glucosidase present in Megazyme pure protein prep was estimated to approx. 1 mg/ml; Although this enzyme was diluted significantly higher to achieve comparable cellobiose digestion rates (2,500-fold vs. 1,200- or 800-fold for SEQ ID NO:556 and SEQ ID NO:560, respectively), its relative specific activity could not be compared to SEQ ID NO:556 and SEQ ID NO:560 since protein preps of very different purity were used in cellobiose digestions;

[1344] (4) Similar semi-quantitative determination of specific activity could not be done for SEQ ID NO:566, SEQ ID NO:542, and SEQ ID NO:548 because relevant protein bands could not be identified on PAGE gel due to low purity of protein preparations available for these enzymes. This is in correlation with significantly higher amount of material (lower protein prep dilutions) required for these enzymes to achieve rates comparable to SEQ ID NO:556 and SEQ ID NO:560.

[1345] (3) Residual Activity of Selected Beta-Glucosidases of the Invention in 4 Hour Cellobiose Digestion at High Temperatures.

[1346] Semi-pure protein preparations from subclone fermentations were diluted to achieve comparable reaction rates as discussed in the previous section: SEQ ID NO:556—1,200-fold, SEQ ID NO:566—400-fold, SEQ ID NO:542—250-fold, SEQ ID NO:548—300-fold, SEQ ID NO:560—800-fold. Megazyme A. niger beta-glucosidase was diluted 2,500-fold. 10 mM cellobiose was used as substrate and digestion reactions were run at 60° C., 70° C. and 80° C. for 4 h with time points taken at each hour. Reaction volume was 50 μl (substrate and enzyme present at 1:1 ratio).

[1347] The following was concluded based on the results obtained in this experiment:

[1348] (1) SEQ ID NO:556 and SEQ ID NO:560 remained active at all temperatures over 4 h reaction time;

[1349] (2) At the end of 4 h reaction, there was no significant difference in activity of these two enzymes at 60° C., 70° C. or 80° C. (comparable amounts of glucose were released at all temperatures);

[1350] (3) Based on the amount of glucose released over time, it appears that >60% of each enzyme remained active at 4 h. This finding indirectly suggests that the two enzymes are stable at higher temperatures and as such, could be suitable candidates to include in a 4-enzyme cocktail;

[1351] (4) SEQ ID NO:566 and SEQ ID NO:542 showed significant loss of activity at 70° C. and 80° C.; SEQ ID NO:548 retained about 50% activity at 70° C. and was inactive at 80° C.; (5) Loss in activity >75% was observed for Megazyme beta-glucosidase at 70° C. and the enzyme was inactive at 80° C.

[1352] Summary:

[1353] Ten exemplary beta-glucosidase of the invention were evaluated in several experiments discussed here and when practical, compared to commercial prep of beta-glucosidase from A. niger purchased from Megazyme. Exemplary enzymes of the invention SEQ ID NO:556 and SEQ ID NO:560 exhibited high reactivity at temperatures up to 90° C. and retained more than 60% activity at pH 5 in 4 hour reaction at 80° C. These two enzymes of the invention outperformed Megazyme commercial beta-glucosidase at 70° C. and 80° C. under test conditions and are considered as top candidates for a 4-enzyme cocktail at this time. Specific activity of beta-glucosidase enzymes of the invention could not be determined accurately due to low purity of protein preparations used in these experiments. Product inhibition is presently being studied with all enzymes evaluated in experiments discussed here.

[1354] Similar characterization can be performed with the other enzymes of the invention, e.g., the remaining four beta-glucosidases identified as top-performers based on data obtained on surrogate substrate (pNP-B-Glucopyranoside). Other enzymes of the invention can be subjected to characterization on cellobiose at different pH and temperatures in order to identify the best enzymes available for 4-enzyme cocktail. Top performing enzymes can be subjected to protein purification in order to determine specific activity more accurately. The best performing enzymes, which will be selected based on all criteria discussed here, can be incorporated in 4-enzyme cocktails and evaluated on pretreated bagasse in combinatorial screens.

### Example 16

### Characterization of Beta-Glucosidases of this Invention

[1355] The main objectives of these studies were: (1) Identify β-glucosidase enzymes of this invention for use in a four enzyme cocktail; and, (2) Identify several enzymes of this invention which could be used in a combinatorial assay.

[1356] Sixty seven beta-glucosidases were partially characterized. Based on the specific activity, pH and temperature profiles, 36 of these enzymes were selected for further evaluation in a four-step selection process which included the following:

[1357] (1) determination of activity on cellobiose and on fluorescent substrate 4-methylumbelliferyl beta-D-glucopyranoside (4-MU-GP) at pH5 and 7 and T=37-90 C;

[1358] (2) expression evaluation;

[1359] (3) determination of residual activity at T=60-80 C, pH5;

[1360] (4) determination of product inhibition. Commercial A. niger beta-glucosidase was used as benchmark in all experiments although direct comparisons would be difficult due to a significant difference in the quality of protein preparations which were available (lyophilized bacterial lysates vs. >90% pure protein in commercial prep). When cellobiose was used as substrate, enzyme activity was determined by glucose oxidase assay.

[1361] Methods/Results:

[1362] (1) Activity of Beta-Glucosidases at pH 5 and pH 7 and at Temperatures 37-90° C.

[1363] Semi-pure lyophilized protein preparations from subclone fermentations were reconstituted in 50% glycerol to obtain 25 mg/ml total protein concentration. Protein preps were subsequently diluted to 0.5 mg/mL and used in the reactions which were run for 1 hour at pH 5 and pH 7 and at 37, 40, 50, 60, 70, 80, and 90° C. in the presence of 10 mM cellobiose substrate (reaction volume was 50 μl; substrate and enzyme present at 1:1 ratio).

[1364] Most of the 36 enzymes of the invention which were tested exhibited pH 5 optimum. Seventeen enzymes were active at ≧50° C., including the exemplary enzymes of this invention SEQ ID NO:556, SEQ ID NO:540, SEQ ID NO:546, SEQ ID NO:566, SEQ ID NO:550, SEQ ID NO:530, SEQ ID NO:542, SEQ ID NO:554, SEQ ID NO:548, SEQ ID NO:564, SEQ ID NO:526, SEQ ID NO:560, SEQ ID NO:592, SEQ ID NO:586, SEQ ID NO:588, SEQ ID NO:578 and SEQ ID NO:558 (Table 1). Fourteen of these enzymes were active at ≧60° C.: SEQ ID NO:556, SEQ ID NO:540, SEQ ID NO:546, SEQ ID NO:566, SEQ ID NO:542, SEQ ID NO:554, SEQ ID NO:548, SEQ ID NO:564, SEQ ID NO:526, SEQ ID NO:560, SEQ ID NO:592, SEQ ID NO:588, SEQ ID NO:578 and SEQ ID NO:558. Thirteen of 36 enzymes had low or no apparent activity.

[1365] (2) Expression of Beta-Glucosidases and thorough Activity Characterization.

[1366] Equivalent of 0.5 mg/mL total protein concentration of semi-pure lyophilized protein preparations was loaded on the SDS-PAGE to determine protein expression and purity. Invitrogen's 4-12% NU-PAGE™ gels were used and electrophoresis was performed in 2× MES buffer at 200V for 50 min. Gels were processed and protein concentration was estimated by densitometry. For thorough activity testing, 0.5 mg/mL of semi-pure lyophilized protein preparations (bacterial cell lysates) were incubated at pH5 for 30 min with 10 mM cellobiose (T=37° C. and 50° C.) and with 1 mM 4-MU-GP (T=37° C.). Commercial A. niger beta-glucosidase (loaded at 0.4 cg/mL) was used as benchmark. Since this preparation contains >90% pure protein, enzyme loading was adjusted to obtain fluorescence which will remain within linear range of the glucose standard curve in the detection assay. Enzyme activity was determined and expressed as μM released glucose (cellobiose substrate) or as U/mL (4-MU-GP substrate).

[1367] Ten of seventeen enzymes of the invention which were active at ≧50° C. were also expressed at >3% purity. These enzymes showed range of activities on cellobiose and on 4-MU-GP. Expression and activity results are summarized in Table 1:

TABLE 1
Expression and activity of 17 selected beta-glucosidases.

| | | beta-glucosidase activity | | |
|---|---|---|---|---|
| | | 37° C. | | 50° C. |
| Enzyme | % purity | μM glucose | U/ml | μM glucose |
| SEQ ID NO: 556 | <3 | 358 | 13 | 323 |
| SEQ ID NO: 540 | <3 | 310 | 44 | 441 |
| SEQ ID NO: 546 | <3 | 450 | 5 | 520 |
| SEQ ID NO: 566 | 4 | 453 | 3 | 332 |
| SEQ ID NO: 550 | 8 | 294 | 1 | 227 |
| SEQ ID NO: 530 | 8 | 277 | 6 | 345 |
| SEQ ID NO: 542 | <3 | 412 | 2 | 333 |
| SEQ ID NO: 554 | 11 | 362 | 2 | 433 |
| SEQ ID NO: 548 | <5 | 461 | 3 | 423 |
| SEQ ID NO: 564 | <5 | 604 | 54 | 515 |
| SEQ ID NO: 526 | 5 | 423 | 4 | 457 |
| SEQ ID NO: 560 | <3 | 242 | 8 | 164 |
| SEQ ID NO: 592 | 7 | 158 | 24 | 174 |
| SEQ ID NO: 586 | 11 | 295 | 9 | 504 |
| SEQ ID NO: 588 | 8 | 273 | 13 | 260 |
| SEQ ID NO: 578 | 8 | 232 | 2 | 440 |
| SEQ ID NO: 558 | 35 | 488 | 10 | 338 |
| Megazyme b-gluc. | >90 | 407 | 24 | 471 |

[1368] Based on results summarized in Table 1, the following 8 enzymes were selected for expression optimization and large scale protein production: SEQ ID NO:556, SEQ ID NO:566, SEQ ID NO:530, SEQ ID NO:548, SEQ ID NO:564, SEQ ID NO:560, SEQ ID NO:586, and SEQ ID NO:558.

[1369] (3) Residual Activity After 0-4 h at pH 5 and T=60-80° C.

[1370] The semi-pure lyophilized preparations (bacterial cell lysates) of 17 enzymes listed in Table 1 (0.25 mg/mL total protein) and commercial A. niger beta-glucosidase (1.0 ug/mL of pure protein, benchmark) were incubated for 0-4 h at 60, 70 and 80° C. at pH 5 (1 mL reaction volume, 200 rpm mixing). Aliquots were removed at every hour and assayed for residual enzyme activity on cellobiose (10 mM, 1 h reaction time, pH5, 60° C.) and on 4-MU-GP (1 mM, 20 min reaction time, pH5, RT).

[1371] Results are summarized in Table 2 and FIG. 1. Seven of 17 tested enzymes retained residual activity at ≧60 C (SEQ ID NO:556, SEQ ID NO:560, SEQ ID NO:566, SEQ ID NO:530, SEQ ID NO:548, SEQ ID NO:564 and SEQ ID NO:554). Six of these enzymes remained 90% active after 4 h at 60° C. and SEQ ID NO:554 remained 25% active after 2 h at 60° C. SEQ ID NO:556 remained 90% active after 4 h incubation at 80° C. and outperformed commercial benchmark (A. niger beta-glucosidase). The benchmark remained active at 60° C., but after one hour at 70° C., it retained less than 20% activity and after one hour at 80° C., it had no activity.

TABLE 2
Residual beta-glucosidase activity after 4 h at 60-80° C.

| Temperature | approximately 90% residual activity after 4 h |
|---|---|
| 60° C. | SEQ ID NO: 566, SEQ ID NO: 530, SEQ ID NO: 548, |
| | SEQ ID NO: 564, SEQ ID NO: 560, SEQ ID NO: 556 |
| 70° C. | SEQ ID NO: 560, SEQ ID NO: 556 |
| 80° C. | SEQ ID NO: 556 |

[1372] (4) Product Inhibition in the Presence of 0-500 mM Glucose.

[1373] Digestion reactions containing 5 mM cellobiose and 0.5 mg/mL total protein of semi-pure lyophilized enzyme preparations and A. niger beta-glucosidase (0.025 mg/mL, benchmark) were dosed with 0, 25, 50, 100, 200, 300, 400 and 500 mM glucose (50□L total reaction volume) and incubated for 1 hat 60° C. at pH 5. Reactions were terminated by adding equal volume of 50 mM Na₂CO₃ buffer pH 10. Amount of cellobiose substrate left after 1 h digestion and amount of glucose present in each sample were analyzed by HPLC.

[1374] Results are summarized in Table 3, below. Three of the 13 enzymes of this invention which were tested, SEQ ID NO:566, SEQ ID NO:548 and SEQ ID NO:564, outperformed commercial benchmark and remained active in the presence of ≧300 mM glucose. SEQ ID NO:566 and SEQ ID NO:564 showed least product inhibition and remained active in the presence of ≧400 nM glucose. In a commercial process which would assume hydrolysis of Brazilian bagasse (approximately 50% cellulose content) at 10% solids and 50% enzymatic conversion, approx. 139 mM glucose (25 g/L) would be generated from 1 kg of starting material. Eight enzymes of the invention listed in Table 3 (SEQ ID NO:556, SEQ ID NO:540, SEQ ID NO:566, SEQ ID NO:530, SEQ ID NO:542, SEQ ID NO:548, SEQ ID NO:564, and SEQ ID NO:592) and Megazyme A. niger beta-glucosidase are expected to remain active under those conditions. However, in a process which would require ≧20% solids, commercial benchmark would be inhibited but SEQ ID NO:566, SEQ ID NO:548 and SEQ ID NO:564 should remain active.

TABLE 3
Table 3. Product inhibition in the presence of glucose.

| Enzyme | Product inhibition (mM glucose) |
|---|---|
| SEQ ID NO: 556 | 200 (starts at 25) |
| SEQ ID NO: 540 | 300 (starts at 50) |
| SEQ ID NO: 546 | 25 |
| SEQ ID NO: 566 | >400 (starts at 25) |
| SEQ ID NO: 550 | NT |
| SEQ ID NO: 530 | 200 (starts at 50) |
| SEQ ID NO: 542 | 200 (starts at 25) |
| SEQ ID NO: 554 | 100 (starts at 50) |
| SEQ ID NO: 548 | 400 (starts at 100) |
| SEQ ID NO: 564 | 500 (starts at 25 |
| SEQ ID NO: 526 | 25 |
| SEQ ID NO: 560 | — |
| SEQ ID NO: 592 | 200 (starts at 25) |
| SEQ ID NO: 586 | — |
| SEQ ID NO: 588 | 100 (starts at 25) |
| SEQ ID NO: 578 | NT |
| SEQ ID NO: 558 | 50 (starts at 25) |
| Megazyme beta-gluc. | 300 (starts at 50) |

NT, not tested.

[1375] Summary:

[1376] Several beta-glucosidases of this invention were identified using the exemplary four-step selection process described in this study. These enzymes of this invention can be used in combinatorial screening and in enzyme cocktails, e.g. 4-enzyme cocktails. Exemplary enzymes of this invention candidates identified in these studies based on individual selection criteria are listed in Table 4, below:

TABLE 4
Best performing enzymes based on individual selection criteria.

| Selection criteria | Best performers |
|---|---|
| Activity at 37-90° C./ | SEQ ID NO: 556, SEQ ID NO: 566, SEQ |
| pH5 and expression | ID NO: 530, SEQ ID NO: 554, SEQ ID NO: 526, |
| | SEQ ID NO: 560, SEQ ID NO: 586, SEQ ID |
| | NO: 588, SEQ ID NO: 558 |
| Residual activity at | SEQ ID NO: 556, SEQ ID NO: 566, SEQ |
| 60-80° C./pH5 | ID NO: 530, SEQ ID NO: 554, SEQ ID NO: 548, |
| | SEQ ID NO: 564, SEQ ID NO: 560, |
| Level of product | SEQ ID NO: 566, SEQ ID NO: 548, SEQ |
| inhibition | ID NO: 564 |

### Example 17

### Enzyme-Coupled Cellulase Discovery Screen of this Invention

[1377] The example describes an exemplary enzyme-coupled cellulase discovery screen of this invention, which in this particular example uses the exemplary enzyme of the invention SEQ ID NO:580, a β-glucosidase. The activity per milligram of protein will vary from prep to prep, depending on success of purification. To better standardize the discovery screen, the activity of a particular batch of this enzyme is now described in U/mL. This protocol describes how to do this.

[1378] Unit Definition

[1379] For this example, the unit definition designates that one unit of SEQ ID NO:580 enzyme will liberate 1.0 μmol of 4-methylumbelliferone from MU-glucopyranoside substrate per minute at pH 7.5 at room temperature (approximately 22° C.).

### Protocol

[1380] 1. Use a black 96-well plate. Plan to position all samples for fast, simultaneous addition of samples and to provide the shortest interval for a kinetic read. FIG. 20 illustrates an example arrangement for three sample preps, where the reading range is B1-E12.

[1381] 2. Make dilutions for a standard curve. Dilute 4-MU in 50 mM sodium phosphate buffer pH 7.5. Make 300 μL of each dilution: 0, 1, 2, 4, 8, and 16 μM.

[1382] 3. Make dilutions of enzyme samples. For each enzyme sample to be tested, make successive 2-fold dilutions, typically starting at 1/500 (i.e., 1/500, 1/1000, 1/2000, 1/4000, 1/8000, and 1/16000). Make 150 μL of each dilution using 50 mM sodium phosphate pH 7.5 buffer as diluent.

[1383] 4. Prepare 2× substrate. Prepare a 2 mM solution of MU-β-glucopyranoside substrate by diluting the stock substrate in 50 mM sodium phosphate buffer pH 7.5. Make about 1 mL of this solution for each enzyme sample to be tested. Place the solution into a pipetting basin.

[1384] 5. Load the standard curve. Load, in duplicate at 100 μL/well onto black 96-well plate.

[1385] 6. Load enzymes. Load enzymes in duplicate at 50 μL per well of each enzyme dilution.

[1386] 7. Set up the SPECTRAMAX™. Set for kinetic read at room temperature with Ex/Em at 360/465 nm. Take readings at 30-second intervals for a total of 5 minutes. Set PMT sensitivity to medium. Make sure the standard curve samples are included in the kinetic read so that they are read under the same conditions.

[1387] 8. Add substrate and start kinetic read. Put plate on SPECTRAMAX™ tray, lid off. Quickly add 50 μL of 2× substrate solution to the wells containing enzyme sample. Use a multichannel pipet for fast, simultaneous addition and mixing of samples. Immediately start kinetic read; save data. Make sure Vmax is calculated by the program in mRFU per minute.

[1388] See FIG. 21, a table summarizing SPECTRAMAX™ data for this cellulase enzyme activity study (liberating 4-methylumbelliferone from MU-glucopyranoside) as “plate 2”.

### Calculations

### Standard Curve

[1389] 1. Use the first kinetic read to gather data for standard curve (since the standard curve is just an endpoint measurement). First convert the μM values to μmol; for example, 100 μL of 25 μM=0.0025 μmol. For each point on the standard, calculate average and standard deviation for the duplicate samples, then subtract the background from the average RFU values.

[1390] 2. Generate a scatter plot using the background-subtracted average values, with μmol 4-MU on the x-axis and RFU on the y-axis.

[1391] 3. Use linear regression to generate the line function relating RFU to μmol 4-MU present. (Since background was subtracted, force y-intercept to 0.) Note: if the R-value is below 0.998, try omitting the data point representing the highest concentration on the standard curve. In MS EXCEL™, format the line function in scientific notation with two (2) decimal points.

[1392] See FIG. 22, a table summarizing kinetic activity data for this cellulase enzyme activity study (liberating 4-methylumbelliferone from MU-glucopyranoside),

### Enzyme Activity

[1393] 1. For each measurement of β-gluc activity, use the dilution that best fits the sensitivity range of the standard curve. Within this dilution, use only the data points that fall within the linear region of the kinetic to generate the Vmax. (Vmax is automatically calculated in the SPECTRAMAX™ software (in mRFU/min).) Calculate the average and standard deviation for each pair of duplicates. Then divide the average mRFU/min by 1000 to get RFU/min.

[1394] 2. Use the line function to translate this value to units of β-gluc activity in μmol/min (RFU/min divided by slope), then multiply by the dilution factor to translate to Vmax in mol/min.

[1395] 3. Take the calculated units and multiply it by the dilution factor used, then divide by the volume added to the well (0.05 mL) to get activity in U/mL.

[1396] 4. The following shows how all calculations can be set up in EXCEL™, using SEQ ID NO:580 as an example, given a standard curve slope of 2,717,377:

PREP

| | | | | | | |
|---|---|---|---|---|---|---|
| #pts based on | 11 | 11 | 11 | 11 | 11 | 11 |
| mRFU/min 1 | 2202734 | 1359733 | 780648 | 430924 | 213174 | 102610 |
| mRFU/min 2 | 2211504 | 1399352 | 774853 | 415638 | 199714 | 95621 |
| avg mRFU/min | 2207119 | 1379542 | 777750 | 423281 | 206444 | 99115 |
| std dev | 6201 | 28015 | 4097 | 10809 | 9518 | 4942 |
| CV | 0.28% | 2.03% | 0.53% | 2.55% | 4.61% | 4.99% |
| RFU/min | 2207 | 1380 | 778 | 423 | 206 | 99 |
| dilution | 500 | 1000 | 2000 | 4000 | 8000 | 16000 |
| activity (μmole/min) | 0.406112122 | 0.507674328 | 0.572427335 | 0.623072647 | 0.60777468 | 0.583594115 |
| vol added (ml) | 0.05 | 0.05 | 0.05 | 0.05 | 0.05 | 0.05 |
| U/mL | 8.1 | 10.2 | 11.4 | 12.5 | 12.2 | 11.7 |

[1397] The standard curve and the kinetics should be measured on the SpectraMax together in the same read so that the sensitivity between standard and sample is matched.
[1398] If 4-MU standards are at all suspect, make fresh dilutions from a good stock.
[1399] Use the same buffer pH for the standard curve and the sample measurements. The fluorescence of 4-MU is highly dependent on pH.

### Reagents

### 4-MU

[1400] 4-Methylumbelliferone (Sigma M1381, FW 176.2): Make a 50 mM stock solution in DMSO and store at −20° C. protected from light.

### MU-β-Glucopyranoside

[1401] 4-Methylumbelliferyl β-D-glucopyranoside (Sigma M3633, FW 338.3): Make a stock solution at 50 mM in DMSO. Store aliquots at −20° C. protected from light.

### Example 18

### Construction of CBM Chimeric Enzymes

[1402] In one embodiment, the invention provides chimeric (e.g., multidomain recombinant) proteins comprising a first domain comprising a signal sequence and/or a carbohydrate binding domain (CBM) of the invention and at least a second domain. The protein can be a fusion protein. The second domain can comprise an enzyme. The protein can be a non-enzyme, e.g., the chimeric protein can comprise a signal sequence and/or a CBM of the invention and a structural protein. This example describes an exemplary protocol for making CBM-comprising polypeptides of this invention.

[1403] CBM Swapping Library Construction

[1404] A GENEREASSEMBLY™ variant library (1080 variants) was constructed using GENEREASSEMBLY™ technology (Verenium Corporation, San Diego, Calif.), using 6 CBHI catalytic domains (see Table 1, below), 30 CBMs derived from fungal and bacterial GHs (see Table 2, below), and 6 natural linkers extracted from GH genes (see Table 3, below).

[1405] The library of DNA fragments representing the CBH variants was cloned into an expression vector for Aspergillus niger containing:
[1406] a) a marker gene giving antibiotic resistance to the transformed A. niger host,
[1407] b) two regions of DNA with homology to the A. niger genome, to direct stable integration of the expression cassette into the genome by homologous recombination, one of which also serves as a transcriptional terminator,
[1408] c) a promoter to drive expression of the CBH, and d) an E. coli replicon containing a marker gene conferring antibiotic resistance to an E. coli host.

[1409] The vector used for screening the CBH variants (pDC-A1) was a reconstruction of the vector pGBFin-5 (described, e.g., in U.S. Pat. No. 7,220,542), that was remade to reduce the total size of the vector. The 2.1 kb 3′ Gla region of pGBFin-5 was reduced to 0.54 kb, the gpd promoter remained the same, but the 2.24 kb amdS sequence was replaced by the 1.02 kb hygB gene encoding hygromycin phosphotransferase. The 2.0 kb glucoamylase promoter gla, was reduced to a 1.15 kb fragment representing the 3′ end of the original sequence. The 2.3 kb 3′ Gla region of pGBFin-5 was also reduced to a 1.1 kb fragment representing the 5′ end of the original sequence. The E. coli replicon for pDC-A1 was taken from pUC18. Overall, the original 12.5 kb pGBFin-5 expression vector (without an insert of a gene intended to be expressed) was reduced to a 7.2 kb vector (no insert).

[1410] After ligation of pools of CBH variant ORF DNA to the vector, the ligation mixture was used to transform chemically competent E. coli Stbl2. Individual E. coli transformants were picked into 96-well plates and grown in liquid culture in 200 μl LB plus ampicillin (100 μg/ml) per well overnight at 30° C. The cells were then used to generate template for sequencing reactions by colony PCR. The sequence data from the library of clones was analyzed to identify unique variants of CBH. The E. coli transformants containing the selected variants were then rearrayed in 96-well format and used to prepare linear DNA of the entire expression cassette (the contents of pDC-A1 with the exception of the E. coli replicon) by PCR, using primers hybridizing to the ends of the 3′ and 3″ Gla regions. Approximately 1 μg of PCR product from each clone was then used to transform A. niger CBS153.88 protoplasts in a PEG-mediated transformation in one well of a 96-well plate (i.e. one clone per well). Transformants were selected on regeneration agar (200 μl per well of PDA plus sucrose at 340 g/l and hygromycin at 200 μg/ml) in the same 96-well format. After 7 days incubation at 30° C., transformants were replicated to 96-well plates containing PDA plus hygromycin (200 μg/ml) using a pintool. Following incubation at 30° C. for a further 7 days, spores from each well were used to inoculate 200 μl liquid media per well of a 96-well plate. The plates were incubated at 30° C. for 7 days, and the supernatant from each well, containing the secreted CBH variant, was recovered.

[1411] The media used to grow the Aspergillus transformed with expression constructs containing the variants had the following composition: NaNO₃, 3.0 g/l; KCl, 0.26 g/l; KH₂PO₄, 0.76 g/l; 4M KOH, 0.56 ml/l; D-Glucose, 5.0 g/l; Casamino Acids, 0.5 g/l; Trace Element Solution 0.5 ml/l; Vitamin Solution 5 ml/l; Penicillin-Streptomycin Solution (10,000 U/ml and 10,000 μg/ml respectively) 5.0 ml/l; Maltose, 66.0 g/l; Soytone, 26.4 g/l; (NH₄)₂SO₄, 6.6 g/l; NaH₂PO₄.H₂O, 0.44 g/l; MgSO₄.7H₂O, 0.44 g/l; Arginine, 0.44 g/l; Tween-80, 0.035 ml/l; Pleuronic Acid Antifoam, 0.0088 ml/l; MES, 18.0 g/l. The Trace Element Solution had the following composition in 100 ml: ZnSO₄.7H₂O, 2.2 g; H₃BO₃, 1.1 g; FeSO₄.7H₂O, 0.5 g; CoCl₂.6H₂O, 0.17 g; CuSO₄.5H₂O, 0.16; MnCl₂.4H₂O, 0.5 g/l; NaMoO₄.2H₂O, 0.15 g/l; EDTA, 5 g/l. The Vitamin Solution had the following composition in 500 ml: Riboflavin, 100 mg; Thiamine.HCl, 100 mg; Nicotinamide, 100 mg; Pyridoxine.HCl, 50 mg; Panthotenic Acid, 10 mg; Biotin 0.2 mg.

[1412] Primary Assay Screen Protocol

[1413] Ground (60-mesh) bagasse substrate, called pBG10C, is diluted to a final of 0.2% cellulose in 50 mM acetate buffer pH 5. 200 μL/well of this are added into a 96-well “substrate” plate. In a 96 well “cocktail” plate 10× enzyme cocktails are made containing the exemplary enzymes of the invention SEQ ID NO:90 (EG), SEQ ID NO:358 (CBHII), and CBHI CBM supernatant grown in A. niger. The final doses are 4 mg EG/g cellulose, 2 mg CBHII/g cellulose, and variable CBHI. To initiate the reaction 22 μL of enzyme cocktail is added to 200 μL of buffered substrate. We perform this digest at 37° C. Timepoints are taken from 0 to 48 hours. Timepoints are taken by transferring the reaction into a 384 well “stop” plate (200 mM Na carbonate buffer pH10). Next an overnight β-glucosidase digest is run on the “stop” plates to breakdown cellobiose into glucose.

[1414] A Glucose Oxidase (GO) assay is then run to measure amount of total glucose generated. CBM mutants were considered active if they showed a GO signal 2× the average of the negative control (vector only). This gave 159 active clones.

TABLE 1
Six Catalytic Domains (CD) Selected For
GENEREASSEMBLY ™ Library

| | CBHI Parental sequence | | | |
|---|---|---|---|---|
| CD | (which includes | GH | Size | |
| Identifier | Catalytic Domain) | Family | (kD) | CBM Location |
| 1 | SEQ ID NO: 360 | 7 | 51.3 | C-terminus |
| 2 | SEQ ID NO: 34 | 7 | 52.6 | C-terminus |
| 3 | SEQ ID NO: 371 | 7 | 54.3 | C-terminus |
| 4 | SEQ ID NO: 606 | 7 | 56.8 | C-terminus |
| 5 | SEQ ID NO: 608 | 7 | 48.3 | Whole sequence |
| 6 | SEQ ID NO: 610 | 7 | 47.9 | Whole sequence |

TABLE 2
Thirty CBMs Selected For GENEREASSEMBLY ™ Library

| CBM | CBM | Parental sequence (which | GH | |
|---|---|---|---|---|
| Identifier | Family | includes CBM) | Family | CBM Location |
| 1 | 3a | Genbank Accession No. | | |
| | | ZP_01575466 | | |
| | | (C. celluolyticum | | |
| | | CipC) | | |
| 2 | 3a | Genbank Accession No. | | |
| | | L08665 | | |
| | | (C. thermocellum | | |
| | | CipA) | | |
| 3 | 3a | Genbank Accession No. | | |
| | | P38058 (C. cellulovorans | | |
| | | CbpA) | | |
| 4 | 3a | Genbank Accession No. | | |
| | | AB004845 (C. josui | | |
| | | CipA) | | |
| 5 | 2a | SEQ ID NO: 468 | 8 | First CBM |
| | | | | (AA 466-570) |
| 6 | 2a | SEQ ID NO: 468 | 8 | Second CBM |
| | | | | (AA 646-746) |
| 7 | 2a | SEQ ID NO: 464 | 5 | N-terminus |
| 8 | 2a | SEQ ID NO: 6 | 6 | C-terminus |
| 9 | 2a | SEQ ID NO: 450 | 5 | N-terminus |
| 10 | 2a | SEQ ID NO: 140 | 48 | N-terminus |
| 11 | 2a | SEQ ID NO: 470 | 5 | C-terminus |
| 12 | 2a | SEQ ID NO: 614 | 12 | |
| 13 | 2a | SEQ ID NO: 4 | 6 | N-terminus |
| 14 | 2a | SEQ ID NO: 612 | | N-terminus |
| 15 | 17_28 | SEQ ID NO: 8 | 5 | internal |
| 16 | 17_28 | SEQ ID NO: 22 | 5 | internal |
| 17 | 17_28 | SEQ ID NO: 10 | 5 | internal |
| 18 | 17_28 | SEQ ID NO: 430 | 5 | internal |
| 19 | 1 | SEQ ID NO: 360 | 7 | C-terminus |
| 20 | 1 | SEQ ID NO: 34 | 7 | C-terminus |
| 21 | 1 | SEQ ID NO: 371 | 7 | C-terminus |
| 22 | 1 | SEQ ID NO: 606 | 7 | C-terminus |
| 23 | 1 | SEQ ID NO: 616 | 7 | C-terminus |
| 24 | 1 | SEQ ID NO: 282 | 6 | N-terminus |
| 25 | 1 | SEQ ID NO: 358 | 6 | N-terminus |
| 26 | 1 | SEQ ID NO: 618 | 7 | C-terminus |
| 27 | 1 | SEQ ID NO: 32 | 7 | C-terminus |
| 28 | 1 | SEQ ID NO: 604 | 7 | C-terminus |
| 29 | 1 | SEQ ID NO: 620 | 6 | N-terminus |
| 30 | 1 | SEQ ID NO: 30 | 7 | C-terminus |

TABLE 3
Six linkers selected for GENEREASSEMBLY ™ library

| | Linker | | |
|---|---|---|---|
| | from | | |
| Linker | CBM | Parental sequence | |
| Identifier | Family | containing linker | Linker AA Sequence |
| 1 | CBM1 | SEQ ID NO: 360 | SGGSSTGGSSTTTASGTTTTKASSTSTSSTS |
| | | | TGTGV (SEQ ID NO: xxxx) |
| 2 | CBM1 | SEQ ID NO: 371 | SGTGGNNPDPEEPEEPEEPV GT (SEQ ID |
| | | | NO: xxxx) |
| 3 | CBM1 | SEQ ID NO: 606 | NSGSTGGGNGSGSTTTTKGSTTTTKAPTTT |
| | | | TTTSKATTTTAASGGNGGG (SEQ ID |
| | | | NO: xxxx) |
| 4 | CBM2a | Thermobifida fusca | TNPNPNPNPTPTPTPTPTPPPGSS (SEQ ID |
| | | GH6 (Genbank | NO: xxxx) |
| | | YP_289135) | |
| 5 | CBM2a | Saccharophagus | SGSSSSSSSSSSSSSSSSSSSSSTSSSSSSSSST |
| | | degradans | SSSSSSSGSSGT (SEQ ID NO: xxxx) |
| | | (Genbank | |
| | | YP_527744) | |
| 6 | CBM2a | Xylella fastidiosa | GGGASGGSGGGAGASSGSGAGGGSSGGA |
| | | (Genbank | GTGSGSGA (SEQ ID NO: xxxx) |
| | | NP_780034.1) | |

TABLE 4
159 active unique CBHI/CBM hybrids

| | Linker | |
|---|---|---|
| | from CBM | CBM |
| Hybrid | Family | Family |
| CD6 + LINK2 + CBM15 | 1 | 17 |
| CD6 + LINK3 + CBM27 | 1 | 1 |
| CD6 + LINK3 + CBM23 | 1 | 1 |
| CD6 + LINK3 + CBM25 | 1 | 1 |
| CD6 + LINK3 + CBM28 | 1 | 1 |
| CD6 + LINK3 + CBM10 | 1 | 2a |
| CD6 + LINK1 + CBM7 | 1 | 2a |
| CD6 + LINK1 + CBM23 | 1 | 1 |
| CD6 + LINK1 + CBM17 | 1 | 17 |
| CD6 + LINK1 + CBM28 | 1 | 1 |
| CD6 + LINK1 + CBM10 | 1 | 2a |
| CD6 + LINK4 + CBM6 | 2a | 2a |
| CD6 + LINK4 + CBM2 | 2a | 3a |
| CD6 + LINK4 + CBM10 | 2a | 2a |
| CD6 + LINK6 + CBM7 | 2a | 2a |
| CD6 + LINK6 + CBM25 | 2a | 1 |
| CD6 + LINK6 + CBM22 | 2a | 1 |
| CD6 + LINK6 + CBM26 | 2a | 1 |
| CD6 + LINK6 + CBM9 | 2a | 2a |
| CD6 + LINK5 + CBM9 | 2a | 2a |
| CD3 + LINK2 + CBM21 | 1 | 1 |
| CD3 + LINK3 + CBM11 | 1 | 2a |
| CD3 + LINK3 + CBM6 | 1 | 2a |
| CD3 + LINK3 + CBM7 | 1 | 2a |
| CD3 + LINK3 + CBM23 | 1 | 1 |
| CD3 + LINK3 + CBM20 | 1 | 1 |
| CD3 + LINK3 + CBM28 | 1 | 1 |
| CD3 + LINK3 + CBM10 | 1 | 2a |
| CD3 + LINK1 + CBM19 | 1 | 1 |
| CD3 + LINK6 + CBM2 | 2a | 3a |
| CD3 + LINK6 + CBM17 | 2a | 17 |
| CD3 + LINK6 + CBM28 | 2a | 1 |
| CD3 + LINK5 + CBM30 | 2a | 1 |
| CD3 + LINK5 + CBM12 | 2a | 2a |
| CD4 + LINK2 + CBM8 | 1 | 2a |
| CD4 + LINK3 + CBM6 | 1 | 2a |
| CD4 + LINK3 + CBM10 | 1 | 2a |
| CD4 + LINK1 + CBM6 | 1 | 2a |
| CD4 + LINK1 + CBM8 | 1 | 2a |
| CD4 + LINK1 + CBM7 | 1 | 2a |
| CD4 + LINK1 + CBM23 | 1 | 1 |
| CD4 + LINK1 + CBM21 | 1 | 1 |
| CD4 + LINK1 + CBM29 | 1 | 1 |
| CD4 + LINK1 + CBM28 | 1 | 1 |
| CD4 + LINK1 + CBM10 | 1 | 2a |
| CD4 + LINK4 + CBM21 | 2a | 1 |
| CD4 + LINK6 + CBM7 | 2a | 2a |
| CD4 + LINK6 + CBM27 | 2a | 1 |
| CD4 + LINK6 + CBM21 | 2a | 1 |
| CD4 + LINK6 + CBM15 | 2a | 17 |
| CD4 + LINK6 + CBM25 | 2a | 1 |
| CD4 + LINK6 + CBM26 | 2a | 1 |
| CD4 + LINK6 + CBM28 | 2a | 1 |
| CD4 + LINK6 + CBM10 | 2a | 2a |
| CD4 + LINK5 + CBM8 | 2a | 2a |
| CD4 + LINK5 + CBM7 | 2a | 2a |
| CD4 + LINK5 + CBM27 | 2a | 1 |
| CD4 + LINK5 + CBM21 | 2a | 1 |
| CD4 + LINK5 + CBM24 | 2a | 1 |
| CD2 + LINK3 + CBM6 | 1 | 2a |
| CD2 + LINK3 + CBM8 | 1 | 2a |
| CD2 + LINK3 + CBM7 | 1 | 2a |
| CD2 + LINK3 + CBM30 | 1 | 1 |
| CD2 + LINK3 + CBM23 | 1 | 1 |
| CD2 + LINK3 + CBM21 | 1 | 1 |
| CD2 + LINK3 + CBM15 | 1 | 17 |
| CD2 + LINK3 + CBM25 | 1 | 1 |
| CD2 + LINK3 + CBM29 | 1 | 1 |
| CD2 + LINK3 + CBM20 | 1 | 1 |
| CD2 + LINK3 + CBM28 | 1 | 1 |
| CD2 + LINK3 + CBM10 | 1 | 2a |
| CD2 + LINK3 + CBM12 | 1 | 2a |
| CD2 + LINK1 + CBM6 | 1 | 2a |
| CD2 + LINK1 + CBM7 | 1 | 2a |
| CD2 + LINK1 + CBM23 | 1 | 1 |
| CD2 + LINK1 + CBM21 | 1 | 1 |
| CD2 + LINK1 + CBM22 | 1 | 1 |
| CD2 + LINK1 + CBM10 | 1 | 2a |
| CD2 + LINK1 + CBM9 | 1 | 2a |
| CD2 + LINK1 + CBM12 | 1 | 2a |
| CD2 + LINK4 + CBM6 | 2a | 2a |
| CD2 + LINK4 + CBM10 | 2a | 2a |
| CD2 + LINK6 + CBM6 | 2a | 2a |
| CD2 + LINK6 + CBM7 | 2a | 2a |
| CD2 + LINK6 + CBM27 | 2a | 1 |
| CD2 + LINK6 + CBM30 | 2a | 1 |
| CD2 + LINK6 + CBM21 | 2a | 1 |
| CD2 + LINK6 + CBM29 | 2a | 1 |
| CD2 + LINK6 + CBM20 | 2a | 1 |
| CD2 + LINK6 + CBM10 | 2a | 2a |
| CD2 + LINK5 + CBM20 | 2a | 1 |
| CD2 + LINK5 + CBM19 | 2a | 1 |
| CD2 + LINK5 + CBM26 | 2a | 1 |
| CD2 + LINK5 + CBM28 | 2a | 1 |
| CD2 + LINK5 + CBM10 | 2a | 2a |
| CD2 + LINK5 + CBM12 | 2a | 2a |
| CD1 + LINK3 + CBM8 | 1 | 2a |
| CD1 + LINK3 + CBM30 | 1 | 1 |
| CD1 + LINK3 + CBM23 | 1 | 1 |
| CD1 + LINK3 + CBM21 | 1 | 1 |
| CD1 + LINK3 + CBM22 | 1 | 1 |
| CD1 + LINK3 + CBM20 | 1 | 1 |
| CD1 + LINK3 + CBM19 | 1 | 1 |
| CD1 + LINK3 + CBM26 | 1 | 1 |
| CD1 + LINK3 + CBM28 | 1 | 1 |
| CD1 + LINK3 + CBM9 | 1 | 2a |
| CD1 + LINK3 + CBM12 | 1 | 2a |
| CD1 + LINK1 + CBM6 | 1 | 2a |
| CD1 + LINK1 + CBM8 | 1 | 2a |
| CD1 + LINK1 + CBM7 | 1 | 2a |
| CD1 + LINK1 + CBM30 | 1 | 1 |
| CD1 + LINK1 + CBM23 | 1 | 1 |
| CD1 + LINK1 + CBM21 | 1 | 1 |
| CD1 + LINK1 + CBM24 | 1 | 1 |
| CD1 + LINK1 + CBM29 | 1 | 1 |
| CD1 + LINK1 + CBM19 | 1 | 1 |
| CD1 + LINK1 + CBM26 | 1 | 1 |
| CD1 + LINK1 + CBM28 | 1 | 1 |
| CD1 + LINK1 + CBM10 | 1 | 3a |
| CD1 + LINK1 + CBM12 | 1 | 2a |
| CD1 + LINK4 + CBM21 | 2a | 1 |
| CD1 + LINK6 + CBM7 | 2a | 2a |
| CD1 + LINK6 + CBM27 | 2a | 1 |
| CD1 + LINK6 + CBM30 | 2a | 1 |
| CD1 + LINK6 + CBM23 | 2a | 1 |
| CD1 + LINK6 + CBM21 | 2a | 1 |
| CD1 + LINK6 + CBM25 | 2a | 1 |
| CD1 + LINK6 + CBM19 | 2a | 1 |
| CD1 + LINK6 + CBM10 | 2a | 2a |
| CD1 + LINK6 + CBM9 | 2a | 2a |
| CD1 + LINK6 + CBM12 | 2a | 2a |
| CD1 + LINK5 + CBM11 | 2a | 2a |
| CD1 + LINK5 + CBM27 | 2a | 1 |
| CD1 + LINK5 + CBM21 | 2a | 1 |
| CD1 + LINK5 + CBM28 | 2a | 1 |
| CD1 + LINK5 + CBM10 | 2a | 2a |
| CD1 + LINK5 + CBM9 | 2a | 2a |
| CD1 + LINK5 + CBM12 | 2a | 2a |
| CD5 + LINK3 + CBM3 | 1 | 3a |
| CD5 + LINK3 + CBM19 | 1 | 1 |
| CD5 + LINK3 + CBM28 | 1 | 1 |
| CD5 + LINK3 + CBM10 | 1 | 2a |
| CD5 + LINK1 + CBM6 | 1 | 2a |
| CD5 + LINK1 + CBM30 | 1 | 1 |
| CD5 + LINK1 + CBM21 | 1 | 1 |
| CD5 + LINK1 + CBM25 | 1 | 1 |
| CD5 + LINK4 + CBM6 | 2a | 2a |
| CD5 + LINK6 + CBM5 | 2a | 2a |
| CD5 + LINK6 + CBM1 | 2a | 3a |
| CD5 + LINK6 + CBM27 | 2a | 1 |
| CD5 + LINK6 + CBM23 | 2a | 1 |
| CD5 + LINK6 + CBM22 | 2a | 1 |
| CD5 + LINK6 + CBM29 | 2a | 1 |
| CD5 + LINK6 + CBM19 | 2a | 1 |
| CD5 + LINK6 + CBM26 | 2a | 1 |
| CD5 + LINK5 + CBM16 | 2a | 17 |
| CD5 + LINK5 + 294EG3 | 2a | 17 |
| CD5 + LINK5 + CBM24 | 2a | 1 |
| CD5 + LINK5 + CBM22 | 2a | 1 |

### Example 19

### Saccharification of a Biomass

[1415] In one embodiment, the invention provides polypeptides having a lignocellulosic activity, including enzymes that convert soluble oligomers to fermentable monomeric sugars, for the saccharification of a biomass. In one aspect, an activity of a polypeptide of the invention comprises enzymatic hydrolysis of (to degrade) soluble cellooligsaccharides and arabinoxylan oligomers into monomer xylose, arabinose and glucose. In one aspect, exemplary enzymes of the invention are used in processes for the saccharification of cellulose or cellulose-comprising compositions, such as plant biomass, e.g., sugarcane bagasse, corn fiber or other plant waste material (such as a hay or straw, e.g., a rice straw or a wheat straw, or any the dry stalk of any cereal plant) or processing or agricultural byproduct. This example describes an exemplary saccharification process of the invention.

[1416] Saccharification Reaction Runs:

[1417] Method

[1418] 250 dw mg of steam exploded bagasse was weighed into 10 mL glass crimp-top vials (5% solids). A volume of MES buffered minimal media (pH5.6) was added to each vial, depending on the enzyme loading, for a final substrate content of 5% solids. Enzymes cocktails were added to the bagasse mixture at 10 mg enzyme per gram solids, with an equal amount of each enzyme component (1:1:1). The total reaction volume is 5 mL (therefore 2.5 mg total enzyme/rxn). A 200 uL time 0 sample was removed from the reaction and frozen at −20° C. The vials were sealed and clamped and placed in a shaking 37° C. incubator. 200 uL samples were removed at 24, 48, and 90 hours. Samples were thawed, spun at 13,200 rpm for 5 minutes, and the supernatant was diluted 10 fold. Sugar composition of these reaction products were analyzed by HPLC against known standards. Conversion was calculated based on the theoretical cellulose value in the bagasse substrate.

| | all cocktails at a 1:1:1 ratio | | | | | |
|---|---|---|---|---|---|---|
| | enzyme | | | | | |
| | components | | | % conversion | | |
| Cocktail # | CBH1 | CBH2 | EG | 24 | 48 | 90 |
| G8 | SEQ ID NO: 360 | SEQ ID NO: 358 | SEQ ID NO: 90 | 29.0 | 43.2 | 52.1 |
| G8F-1 | SEQ ID NO: 360 | SEQ ID NO: 358 | SEQ ID NO: 502 | 30.4 | 41.3 | 49.0 |
| G8F-2 | SEQ ID NO: 360 | SEQ ID NO: 358 | SEQ ID NO: 500 | 31.6 | 42.9 | 50.7 |
| 4 | SEQ ID NO: 360 | SEQ ID NO: 282 | SEQ ID NO: 90 | 22.3 | 33.9 | 34.8 |
| 5 | SEQ ID NO: 360 | SEQ ID NO: 282 | SEQ ID NO: 502 | 27.5 | 40.2 | 42.7 |
| 6 | SEQ ID NO: 360 | SEQ ID NO: 282 | SEQ ID NO: 500 | 23.3 | 35.2 | 34.8 |
| 7 | SEQ ID NO: 360 | SEQ ID NO: 598 | SEQ ID NO: 90 | 27.9 | 40.5 | 50.1 |
| 8 | SEQ ID NO: 360 | SEQ ID NO: 598 | SEQ ID NO: 502 | 28.4 | 38.7 | 47.3 |
| 9 | SEQ ID | SEQ ID | SEQ ID | 29.7 | 39.6 | 46.7 |
| | NO: 360 | NO: 598 | NO: 500 | | | |

[1419] 96-Well Plate Assay—Percent Bagasse Conversion:

[1420] Method

[1421] Steam exploded bagasse was resuspended in MES buffered minimal media (pH 5.6) at 0.4% cellulose. 200 ul of buffered substrate was added to each well in a 96-well plate. Enzyme cocktails were prepared at 0.432 mg enzyme/mL in water, with equal amounts of each enzyme component. 22.22 ul of a cocktail were added to the substrate and mixed by pipette for a final loading of 12 mg enzyme/g cellulose. The digest plates were centrifuged at 4000 rpm for 1 minute and 15 ul of the supernatant was transferred to 45 ul 200 mM NaCarbonate pH10 in a 384-well plate (“Stop Plate”). The digest plates were sealed and incubated at 37° C. Additional timepoints were taken at 22 and 70 hours.

[1422] The beta-glucosidase and GO assay steps are substantially described in Example 5. Conversion was calculated based on the theoretical cellulose value in the bagasse substrate.

| | Timepoints | | |
|---|---|---|---|
| enzymes | 0 | 22 | 70 |
| SEQ ID NO: 360 + SEQ ID NO: 358 + | 0 | 29.2% | 44.0% |
| SEQ ID NO: 500 | | | |
| SEQ ID NO: 360 + SEQ ID NO: 602 + | 0 | 35.6% | 49.1% |
| SEQ ID NO: 500 | | | |
| SEQ ID NO: 604 + SEQ ID NO: 358 + | 0 | 35.8% | 48.1% |
| SEQ ID NO: 500 | | | |
| SEQ ID NO: 604 + SEQ ID NO: 602 + | 0 | 38.6% | 50.9% |
| SEQ ID NO: 500 | | | |
| SEQ ID NO: 360 + SEQ ID NO: 358 | 0 | 15.5% | 30.0% |
| SEQ ID NO: 358 + SEQ ID NO: 602 | 0 | 20.2% | 34.1% |
| SEQ ID NO: 360 | 0 | 6.2% | 14.7% |
| SEQ ID NO: 604 | 0 | 11.2% | 21.1% |
| SEQ ID NO: 360 + SEQ ID NO: 500 | 0 | 25.9% | 34.1% |
| SEQ ID NO: 360 + SEQ ID NO: 602 | 0 | 16.8% | 28.8% |
| SEQ ID NO: 604 + SEQ ID NO: 500 | 0 | 32.7% | 46.6% |
| SEQ ID NO: 604 + SEQ ID NO: 602 | 0 | 21.0% | 32.2% |
| SEQ ID NO: 602 + SEQ ID NO: 500 | 0 | 13.0% | 24.7% |
| SEQ ID NO: 604 + SEQ ID NO: 358 | 0 | 3.9% | 8.1% |
| SEQ ID NO: 358 | 0 | 1.8% | 4.9% |
| SEQ ID NO: 602 | 0 | 4.2% | 8.0% |
| SEQ ID NO: 358 + SEQ ID NO: 500 | 0 | 15.2% | 19.3% |
| SEQ ID NO: 360 + SEQ ID NO: 604 | 0 | 9.0% | 19.9% |
| SEQ ID NO: 500 | 0 | 11.0% | 16.8% |

[1423] Ratio Optimization (D.O.E.):

[1424] Method

[1425] Steam exploded bagasse was resuspended in MES buffered minimal media (pH 5.6) at 1% solids. 160 ul of buffered substrate was added to each well in a 96-well plate, along with 2 metal BBs. Enzyme cocktails were prepared with volumes of each component dependent on desired enzyme ratio. 40 ul of a cocktail were added to the substrate and mixed by pipette for a final loading of 25 mg enzyme/g cellulose. The digest plates were centrifuged at 4000 rpm for 1 minute and 20 ul of the supernatant was transferred to 60 ul of 150 mM NaCarbonate pH10 in a 384-well plate (“Stop Plate”). The digest plates were sealed and incubated at 35° C. while shaking at 250 rpm. Additional timepoints were taken at 7, 26 and 50 hours. The B-glucosidase and GO assay steps are substantially as described in Example 5. Conversion was calculated based on the theoretical cellulose value in the bagasse substrate.

| | |
|---|---|
| SEQ ID NO: 360 + | |
| SEQ ID NO: 358 + | |
| SEQ ID NO: 90 | timepoints (hrs) |

| | enzyme ratio | 7 | 26 | 50 |
|---|---|---|---|---|
| 1 | 1:0:0 | 2.95% | 7.38% | 19.59% |
| 2 | 0:1:0 | 2.21% | 4.75% | 8.80% |
| 3 | 0:0:1 | 1.36% | 2.23% | 5.10% |
| 4 | 1:1:0 | 5.06% | 14.46% | 26.07% |
| 5 | 1:0:1 | 8.90% | 18.40% | 27.23% |
| 6 | 0:1:1 | −1.28% | 15.88% | 17.12% |
| 7 | 1:1:1 | 12.18% | 24.52% | 40.26% |
| 8 | 4:1:1 | 9.44% | 23.68% | 37.53% |
| 9 | 1:4:1 | 9.90% | 24.16% | 39.22% |
| 10 | 1:1:4 | 12.73% | 26.11% | 38.93% |

| | |
|---|---|
| SEQ ID NO: 360 + | |
| SEQ ID NO: 358 + | |
| SEQ ID NO: 500 | timepoints (hrs) |

| | enzyme ratio | 7 | 26 | 50 |
|---|---|---|---|---|
| 1 | 1:0:0 | 2.88% | 7.96% | 17.65% |
| 2 | 0:1:0 | 2.66% | 5.25% | 8.17% |
| 3 | 0:0:1 | 5.98% | 9.37% | 14.51% |
| 4 | 1:1:0 | 5.71% | 17.87% | 28.39% |
| 5 | 1:0:1 | 8.48% | 19.94% | 31.52% |
| 6 | 0:1:1 | −1.18% | 13.27% | 18.77% |
| 7 | 1:1:1 | 11.72% | 26.88% | 41.74% |
| 8 | 4:1:1 | 10.29% | 27.25% | 41.59% |
| 9 | 1:4:1 | 10.70% | 24.98% | 40.60% |
| 10 | 1:1:4 | 9.68% | 24.13% | 28.71% |

| | |
|---|---|
| SEQ ID NO: 360 + | |
| SEQ ID NO: 358 + | |
| SEQ ID NO: 502 | timepoints (hrs) |

| | enzyme ratio | 7 | 26 | 50 |
|---|---|---|---|---|
| 1 | 1:0:0 | 2.18% | 8.32% | 18.92% |
| 2 | 0:1:0 | 2.34% | 4.14% | 9.02% |
| 3 | 0:0:1 | 8.71% | 12.33% | 16.73% |
| 4 | 1:1:0 | 4.99% | 15.35% | 25.84% |
| 5 | 1:0:1 | 10.21% | 17.60% | 34.20% |
| 6 | 0:1:1 | −0.63% | 13.57% | 16.97% |
| 7 | 1:1:1 | 13.33% | 27.64% | 44.73% |
| 8 | 4:1:1 | 9.47% | 25.30% | 38.45% |
| 9 | 1:4:1 | 10.24% | 25.13% | 41.67% |
| 10 | 1:1:4 | 11.05% | 25.51% | 38.88% |

| | |
|---|---|
| SEQ ID NO: 360 + | |
| SEQ ID NO: 598 + | |
| SEQ ID NO: 90 | timepoints (hrs) |

| | enzyme ratio | 7 | 26 | 50 |
|---|---|---|---|---|
| 1 | 1:0:0 | 2.46% | 7.92% | 17.59% |
| 2 | 0:1:0 | 3.06% | 7.14% | 11.30% |
| 3 | 0:0:1 | 0.55% | 2.17% | 3.06% |
| 4 | 1:1:0 | 5.89% | 14.77% | 24.96% |
| 5 | 1:0:1 | 7.51% | 18.03% | 25.56% |
| 6 | 0:1:1 | −3.49% | 9.84% | 14.54% |
| 7 | 1:1:1 | 8.80% | 21.11% | 36.29% |
| 8 | 4:1:1 | 8.11% | 20.95% | 32.51% |
| 9 | 1:4:1 | 7.49% | 16.79% | 27.12% |
| 10 | 1:1:4 | 7.33% | 19.77% | 27.84% |

| | |
|---|---|
| SEQ ID NO: 360 + | |
| SEQ ID NO: 598 + | |
| SEQ ID NO: 500 | timepoints (hrs) |

| | enzyme ratio | 7 | 26 | 50 |
|---|---|---|---|---|
| 1 | 1:0:0 | 2.48% | 9.18% | 21.12% |
| 2 | 0:1:0 | 3.13% | 7.50% | 11.13% |
| 3 | 0:0:1 | 5.71% | 10.97% | 14.29% |
| 4 | 1:1:0 | 5.60% | 17.49% | 26.41% |
| 5 | 1:0:1 | 8.91% | 19.23% | 32.27% |
| 6 | 0:1:1 | −3.05% | 11.73% | 16.19% |
| 7 | 1:1:1 | 9.61% | 22.22% | 40.87% |
| 8 | 4:1:1 | 8.93% | 22.71% | 36.09% |
| 9 | 1:4:1 | 8.89% | 19.41% | 28.79% |
| 10 | 1:1:4 | 7.32% | 20.54% | 29.78% |

| | |
|---|---|
| SEQ ID NO: 360 + | |
| SEQ ID NO: 598 + | |
| SEQ ID NO: 502 | timepoints (hrs) |

| | enzyme ratio | 7 | 26 | 50 |
|---|---|---|---|---|
| 1 | 1:0:0 | 2.40% | 8.40% | 18.15% |
| 2 | 0:1:0 | 2.26% | 6.25% | 12.05% |
| 3 | 0:0:1 | 7.69% | 12.34% | 15.05% |
| 4 | 1:1:0 | 5.49% | 15.29% | 22.97% |
| 5 | 1:0:1 | 10.06% | 20.99% | 30.39% |
| 6 | 0:1:1 | −2.78% | 14.58% | 18.21% |
| 7 | 1:1:1 | 10.66% | 24.50% | 45.32% |
| 8 | 4:1:1 | 8.34% | 24.54% | 43.78% |
| 9 | 1:4:1 | 8.40% | 21.06% | 35.09% |
| 10 | 1:1:4 | 7.61% | 22.16% | 35.57% |

| | |
|---|---|
| SEQ ID NO: 600 + | |
| SEQ ID NO: 358 + | |
| SEQ ID NO: 90 | timepoints (hrs) |

| | enzyme ratio | 7 | 26 | 50 |
|---|---|---|---|---|
| 1 | 1:0:0 | 3.09% | 6.83% | 14.55% |
| 2 | 0:1:0 | 2.91% | 4.67% | 7.80% |
| 3 | 0:0:1 | 0.17% | 1.81% | 4.19% |
| 4 | 1:1:0 | 4.53% | 13.34% | 25.02% |
| 5 | 1:0:1 | 10.50% | 19.20% | 27.23% |
| 6 | 0:1:1 | 1.41% | 16.29% | 20.61% |
| 7 | 1:1:1 | 12.15% | 25.47% | 37.18% |
| 8 | 4:1:1 | 7.51% | 20.45% | 31.59% |
| 9 | 1:4:1 | 8.18% | 19.47% | 33.19% |
| 10 | 1:1:4 | 12.71% | 24.87% | 34.87% |

| | |
|---|---|
| SEQ ID NO: 600 + | |
| SEQ ID NO: 358 + | |
| SEQ ID NO: 500 | timepoints (hrs) |

| | enzyme ratio | 7 | 26 | 50 |
|---|---|---|---|---|
| 1 | 1:0:0 | 3.98% | 9.33% | 18.83% |
| 2 | 0:1:0 | 2.67% | 5.09% | 8.34% |
| 3 | 0:0:1 | 5.24% | 10.93% | 15.68% |
| 4 | 1:1:0 | 4.41% | 15.19% | 25.74% |
| 5 | 1:0:1 | 9.04% | 18.78% | 28.19% |
| 6 | 0:1:1 | −0.01% | 14.03% | 18.77% |
| 7 | 1:1:1 | 10.29% | 26.53% | 35.70% |
| 8 | 4:1:1 | 8.57% | 26.13% | 35.71% |
| 9 | 1:4:1 | 7.84% | 22.05% | 31.31% |
| 10 | 1:1:4 | 9.31% | 22.60% | 22.74% |

| | |
|---|---|
| SEQ ID NO: 600 + | |
| SEQ ID NO: 358 + | |
| SEQ ID NO: 502 | timepoints (hrs) |

| | enzyme ratio | 7 | 26 | 50 |
|---|---|---|---|---|
| 1 | 1:0:0 | 3.77% | 8.12% | 16.72% |
| 2 | 0:1:0 | 2.73% | 4.64% | 8.17% |
| 3 | 0:0:1 | 7.52% | 12.72% | 18.42% |
| 4 | 1:1:0 | 4.01% | 13.95% | 22.30% |
| 5 | 1:0:1 | 10.34% | 19.33% | 30.76% |
| 6 | 0:1:1 | −0.10% | 13.60% | 19.24% |
| 7 | 1:1:1 | 10.50% | 23.28% | 35.85% |
| 8 | 4:1:1 | 9.57% | 25.39% | 34.05% |
| 9 | 1:4:1 | 8.58% | 23.47% | 33.90% |
| 10 | 1:1:4 | 11.08% | 20.87% | 30.97% |

| | |
|---|---|
| SEQ ID NO: 600 + | |
| SEQ ID NO: 598 + | |
| SEQ ID NO: 90 | timepoints (hrs) |

| | enzyme ratio | 7 | 26 | 50 |
|---|---|---|---|---|
| 1 | 1:0:0 | 2.95% | 7.09% | 13.88% |
| 2 | 0:1:0 | 3.45% | 7.17% | 11.49% |
| 3 | 0:0:1 | 0.63% | 1.92% | 1.84% |
| 4 | 1:1:0 | 4.06% | 16.37% | 27.10% |
| 5 | 1:0:1 | 9.74% | 20.63% | 25.82% |
| 6 | 0:1:1 | −2.26% | 9.02% | 18.36% |
| 7 | 1:1:1 | 11.88% | 25.40% | 37.81% |
| 8 | 4:1:1 | 8.88% | 23.35% | 35.56% |
| 9 | 1:4:1 | 9.67% | 17.67% | 33.61% |
| 10 | 1:1:4 | 11.58% | 25.61% | 33.39% |

| | |
|---|---|
| SEQ ID NO: 600 + | |
| SEQ ID NO: 598 + | |
| SEQ ID NO: 500 | timepoints (hrs) |

| | enzyme ratio | 7 | 26 | 50 |
|---|---|---|---|---|
| 1 | 1:0:0 | 3.07% | 7.45% | 17.08% |
| 2 | 0:1:0 | 3.68% | 7.72% | 10.87% |
| 3 | 0:0:1 | 4.78% | 11.56% | 15.39% |
| 4 | 1:1:0 | 7.81% | 20.45% | 28.27% |
| 5 | 1:0:1 | 8.76% | 20.15% | 28.68% |
| 6 | 0:1:1 | −2.13% | 13.25% | 18.02% |
| 7 | 1:1:1 | 12.35% | 26.57% | 38.78% |
| 8 | 4:1:1 | 7.89% | 21.12% | 30.99% |
| 9 | 1:4:1 | 7.43% | 15.77% | 35.67% |
| 10 | 1:1:4 | 10.73% | 18.58% | 32.46% |

| | |
|---|---|
| SEQ ID NO: 600 + | |
| SEQ ID NO: 598 + | |
| SEQ ID NO: 502 | timepoints (hrs) |

| | enzyme ratio | 7 | 26 | 50 |
|---|---|---|---|---|
| 1 | 1:0:0 | 3.30% | 8.38% | 16.36% |
| 2 | 0:1:0 | 2.45% | 6.66% | 10.98% |
| 3 | 0:0:1 | 7.80% | 13.21% | 16.74% |
| 4 | 1:1:0 | 6.69% | 18.04% | 24.76% |
| 5 | 1:0:1 | 9.54% | 16.12% | 32.56% |
| 6 | 0:1:1 | −2.71% | 16.28% | 13.41% |
| 7 | 1:1:1 | 12.70% | 25.20% | 40.74% |
| 8 | 4:1:1 | 9.43% | 25.41% | 36.63% |
| 9 | 1:4:1 | 10.34% | 22.03% | 36.80% |
| 10 | 1:1:4 | 9.05% | 14.69% | 26.07% |

### Example 20

### Enzyme “Cocktails for Biomass Conversion

[1426] In one embodiment, the invention provides enzyme “cocktails” or mixtures (“cocktails” meaning mixtures of enzymes comprising at least one enzyme of this invention) to process, or “convert”, biomass, e.g., for making a biofuel such as bioethanol, biobutanol, biopropanol, biodiesel and the like. Enzyme “cocktails” or mixtures of the invention can be used to hydrolyze the major components of a lignocellulosic biomass, or any composition comprising cellulose and/or hemicellulose (lignocellulosic biomass also comprises lignin), e.g., seeds, grains, tubers, plant waste (such as a hay or straw, e.g., a rice straw or a wheat straw, or any the dry stalk of any cereal plant) or byproducts of food processing or industrial processing (e.g., stalks), corn (including cobs, stover, and the like), grasses (e.g., Indian grass, such as Sorghastrum nutans; or, switch grass, e.g., Panicum species, such as Panicum virgatum), wood (including wood chips, processing waste, such as wood waste), paper, pulp, recycled paper (e.g., newspaper); also including a monocot or a dicot, or a monocot corn, sugarcane or parts thereof (e.g., cane tops), rice, wheat, barley, switchgrass or Miscanthus; or a dicot oilseed crop, soy, canola, rapeseed, flax, cotton, palm oil, sugar beet, peanut, tree, poplar or lupine.

[1427] Enzyme “cocktails” or mixtures of the invention can include any combination of enzymes, e.g., ferulic acid esterases, arabinofuranosidases, alpha-glucuronidases, acetyl xylan esterases, xylosidases, xylanases, endoglucanases and beta-glucanases, etc., where in alternative embodiments at least one, or several or all of the enzymes of the “cocktail” or mixture is/are an enzyme of this invention.

[1428] For example, FIG. 23 illustrates data showing the wheat arabinoxylan digest products (digest profiles) of three enzymes of the invention (the exemplary SEQ ID NO:664; SEQ ID NO:630; SEQ ID NO:628) that can be used in enzyme “cocktails” or mixtures of the invention; these three enzymes are xylanases initially derived from different Cochliobolus. Each enzyme was used to digest wheat arabinoxylan and the resulting products analyzed by capillary electrophoresis.

[1429] FIG. 24 is a graphic illustration of data showing how arabinofuranosidases of the invention (the exemplary SEQ ID NO:686; SEQ ID NO:682; SEQ ID NO:660; SEQ ID NO:662) synergize with xylanases of the invention to digest wheat arabinoxylan; and this figure also illustrates an exemplary “cocktail” or mixture of the invention. Exemplary arabinofuranosidases of the invention were used to digest wheat arabinoxylan with or without xylanase; e.g., the polypeptide SEQ ID NO:719. The amount of substrate digestion was measured with the BCA assay for reducing sugars.

[1430] FIG. 25 is a graphic illustration of data showing a promotion effect of beta (B)-xylosidases of the invention SEQ ID NO:550; SEQ ID NO:700; SEQ ID NO:698; SEQ ID NO:622; SEQ ID NO:672; SEQ ID NO:626; SEQ ID NO:632; SEQ ID NO:636; SEQ ID NO:656; and, SEQ ID NO:696 (as indicated in the figure) over the exemplary SEQ ID NO:719 xylanase in a wheat arabinoxylan digest. Wheat arabinoxylan was digested with individual β-xylosidases in combination with xylanase SEQ ID NO:719; the BCA assay was used to quantify the reducing sugars produced. The % increase over the SEQ ID NO:719 xylanase alone is presented.

[1431] FIG. 26 is a graphic illustration of data showing a ferulic acid esterase (FAE) activity with corn seed fiber as a substrate using an exemplary enzyme of this invention. Corn seed fiber was digested with the ferulic acid esterase (FAE) SEQ ID NO:640 with or without xylanase SEQ ID NO:719 and the resulting ferulic acid produce was measured by HPLC. This mixture of the FAE SEQ ID NO:640 and the xylanase SEQ ID NO:719 is an exemplary mixture of this invention.

[1432] FIG. 27 is a graphic illustration of data showing from an activity assay with acetylated xylan as a substrate using the exemplary acetyl xylan esterases of this invention SEQ ID NO:640, SEQ ID NO:650 and SEQ ID NO:688. Acetate release from acetylated xylan was used to demonstrate acetyl xylan esterase activity. The figure shows esterase activity on 500 μg acetylated xylan reactions, pH 5, 24 hr incubation.

[1433] FIG. 28 is a graphic illustration of data showing an alpha (α)-glucuronidase activity assay with an aldo-uronic acid mixture as a substrate using the exemplary acetyl xylan esterases of this invention SEQ ID NO:648, SEQ ID NO:654 and SEQ ID NO:680. LC-MS was used to detect glucuronic acid release to demonstrate α-glucuronidase activity on an aldo-uronic acid mixture

[1434] A number of aspects of the invention have been described. Nevertheless, it will be understood that various modifications may be made without departing from the spirit and scope of the invention. Accordingly, other aspects are within the scope of the following claims.

1. An isolated, synthetic or recombinant nucleic acid comprising
(a) a nucleic acid sequence (polynucleotide) having at least 80%, 81%, 82%, 83%, 84%, 85%, 86%, 87%, 88%, 89%, 90%, 91%, 92%, 93%, 94%, 95%, 96%, 97%, 98%, 99%, or more or complete (100%) sequence identity to SEQ ID NO:1, SEQ ID NO:3, SEQ ID NO:5, SEQ ID NO:7, SEQ ID NO:9, SEQ ID NO:11, SEQ ID NO:13, SEQ ID NO:15, SEQ ID NO:17, SEQ ID NO:19, SEQ ID NO:21, SEQ ID NO:23, SEQ ID NO:25, SEQ ID NO:27, SEQ ID NO:29, SEQ ID NO:31, SEQ ID NO:33, SEQ ID NO:35, SEQ ID NO:37, SEQ ID NO:39, SEQ ID NO:41, SEQ ID NO:43, SEQ ID NO:45, SEQ ID NO:47, SEQ ID NO:49, SEQ ID NO:51, SEQ ID NO:53, SEQ ID NO:55, SEQ ID NO:57, SEQ ID NO:59, SEQ ID NO:61, SEQ ID NO:63, SEQ ID NO:65, SEQ ID NO:67, SEQ ID NO:69, SEQ ID NO:71, SEQ ID NO:73, SEQ ID NO:75, SEQ ID NO:77, SEQ ID NO:79, SEQ ID NO:81, SEQ ID NO:83, SEQ ID NO:85, SEQ ID NO:87, SEQ ID NO:89, SEQ ID NO:91, SEQ ID NO:93, SEQ ID NO:95, SEQ ID NO:97, SEQ ID NO:99, SEQ ID NO:101, SEQ ID NO:103, SEQ ID NO:105, SEQ ID NO:107, SEQ ID NO:109, SEQ ID NO:111, SEQ ID NO:113, SEQ ID NO:115, SEQ ID NO:117, SEQ ID NO:119, SEQ ID NO:121, SEQ ID NO:123, SEQ ID NO:125, SEQ ID NO:127, SEQ ID NO:129, SEQ ID NO:131, SEQ ID NO:133, SEQ ID NO:135, SEQ ID NO:137, SEQ ID NO:139, SEQ ID NO:141, SEQ ID NO:143, SEQ ID NO:145, SEQ ID NO:147, SEQ ID NO:149, SEQ ID NO:151, SEQ ID NO:153, SEQ ID NO:155, SEQ ID NO:157, SEQ ID NO:159, SEQ ID NO:161, SEQ ID NO:163, SEQ ID NO:165, SEQ ID NO:167, SEQ ID NO:169, SEQ ID NO:171, SEQ ID NO:173, SEQ ID NO:175, SEQ ID NO:177, SEQ ID NO:179, SEQ ID NO:181, SEQ ID NO:183, SEQ ID NO:185, SEQ ID NO:187, SEQ ID NO:189, SEQ ID NO:191, SEQ ID NO:193, SEQ ID NO:195, SEQ ID NO:197, SEQ ID NO:199, SEQ ID NO:201, SEQ ID NO:203, SEQ ID NO:205, SEQ ID NO:207, SEQ ID NO:209, SEQ ID NO:211, SEQ ID NO:213, SEQ ID NO:215, SEQ ID NO:217, SEQ ID NO:219, SEQ ID NO:221, SEQ ID NO:223, SEQ ID NO:225, SEQ ID NO:227, SEQ ID NO:229, SEQ ID NO:231, SEQ ID NO:233, SEQ ID NO:235, SEQ ID NO:237, SEQ ID NO:239, SEQ ID NO:241, SEQ ID NO:243, SEQ ID NO:245, SEQ ID NO:247, SEQ ID NO:249, SEQ ID NO:251, SEQ ID NO:253, SEQ ID NO:255, SEQ ID NO:257, SEQ ID NO:259, SEQ ID NO:261, SEQ ID NO:263, SEQ ID NO:265, SEQ ID NO:267, SEQ ID NO:269, SEQ ID NO:271, SEQ ID NO:273, SEQ ID NO:275, SEQ ID NO:277, SEQ ID NO:279, SEQ ID NO:281, SEQ ID NO:283, SEQ ID NO:285, SEQ ID NO:287, SEQ ID NO:289, SEQ ID NO:291, SEQ ID NO:293, SEQ ID NO:295, SEQ ID NO:297, SEQ ID NO:299, SEQ ID NO:301, SEQ ID NO:303, SEQ ID NO:305, SEQ ID NO:307, SEQ ID NO:309, SEQ ID NO:311, SEQ ID NO:313, SEQ ID NO:315, SEQ ID NO:317, SEQ ID NO:319, SEQ ID NO:321, SEQ ID NO:323, SEQ ID NO:325, SEQ ID NO:327, SEQ ID NO:329, SEQ ID NO:331, SEQ ID NO:333, SEQ ID NO:335, SEQ ID NO:337, SEQ ID NO:339, SEQ ID NO:341, SEQ ID NO:343, SEQ ID NO:345, SEQ ID NO:347, SEQ ID NO:349, SEQ ID NO:351, SEQ ID NO:353, SEQ ID NO:355, SEQ ID NO:357, SEQ ID NO:359, SEQ ID NO:361, SEQ ID NO:363, SEQ ID NO:365, SEQ ID NO:367, SEQ ID NO:369, SEQ ID NO:370, SEQ ID NO:372, SEQ ID NO:373, SEQ ID NO:375, SEQ ID NO:376, SEQ ID NO:378, SEQ ID NO:379, SEQ ID NO:381, SEQ ID NO:382, SEQ ID NO:384, SEQ ID NO:385, SEQ ID NO:387, SEQ ID NO:388, SEQ ID NO:390, SEQ ID NO:391, SEQ ID NO:393, SEQ ID NO:394, SEQ ID NO:396, SEQ ID NO:397, SEQ ID NO:399, SEQ ID NO:400, SEQ ID NO:402, SEQ ID NO:403, SEQ ID NO:405, SEQ ID NO:406, SEQ ID NO:408, SEQ ID NO:409, SEQ ID NO:411, SEQ ID NO:412, SEQ ID NO:414, SEQ ID NO:415, SEQ ID NO:417, SEQ ID NO:418, SEQ ID NO:420, SEQ ID NO:421, SEQ ID NO:423, SEQ ID NO:425, SEQ ID NO:427, SEQ ID NO:429, SEQ ID NO:431, SEQ ID NO:433, SEQ ID NO: 435, SEQ ID NO:437, SEQ ID NO:439, SEQ ID NO:441, SEQ ID NO:443, SEQ ID NO:445, SEQ ID NO:447, SEQ ID NO:449, SEQ ID NO:451, SEQ ID NO:453, SEQ ID NO:455, SEQ ID NO:457, SEQ ID NO:459, SEQ ID NO:461, SEQ ID NO:463, SEQ ID NO:465, SEQ ID NO:467, SEQ ID NO:469 and/or SEQ ID NO:471, SEQ ID NO:480, SEQ ID NO:481, SEQ ID NO:482, SEQ ID NO:483, SEQ ID NO:484, SEQ ID NO:485, SEQ ID NO:486, SEQ ID NO:487, SEQ ID NO:488, all the odd numbered SEQ ID NOs: between SEQ ID NO:489 and SEQ ID NO:700, SEQ ID NO:707, SEQ ID NO:708, SEQ ID NO:709, SEQ ID NO:710, SEQ ID NO:711, SEQ ID NO:712, SEQ ID NO:713, SEQ ID NO:714, SEQ ID NO:715, SEQ ID NO:716, SEQ ID NO:717, SEQ ID NO:718, and/or SEQ ID NO:720, or nucleic acids encoding an enzymatically active subsequence (fragment) thereof,
wherein the nucleic acid (polynucleotide) encodes a polypeptide having a lignocellulosic activity, or encodes a polypeptide or peptide capable of generating an antibody that specifically binds to SEQ ID NO:2, SEQ ID NO:4, SEQ ID NO:6, SEQ ID NO:8, SEQ ID NO:10, SEQ ID NO:12, SEQ ID NO:14, SEQ ID NO:16, SEQ ID NO:18, SEQ ID NO:20, SEQ ID NO:22, SEQ ID NO:24, SEQ ID NO:26, SEQ ID NO:28, SEQ ID NO:30, SEQ ID NO:32, SEQ ID NO:34, SEQ ID NO:36, SEQ ID NO:38, SEQ ID NO:40, SEQ ID NO:42, SEQ ID NO:44, SEQ ID NO:46, SEQ ID NO:48, SEQ ID NO:50, SEQ ID NO:52, SEQ ID NO:54, SEQ ID NO:56, SEQ ID NO:58, SEQ ID NO:60, SEQ ID NO:62, SEQ ID NO:64, SEQ ID NO:66, SEQ ID NO:68, SEQ ID NO:70, SEQ ID NO:72, SEQ ID NO:74, SEQ ID NO:76, SEQ ID NO:78, SEQ ID NO:80, SEQ ID NO:82, SEQ ID NO:84, SEQ ID NO:86, SEQ ID NO:88, SEQ ID NO:90, SEQ ID NO:92, SEQ ID NO:94, SEQ ID NO:96, SEQ ID NO:98, SEQ ID NO:100, SEQ ID NO:102, SEQ ID NO:104, SEQ ID NO:106, SEQ ID NO:108, SEQ ID NO:110, SEQ ID NO:112, SEQ ID NO:114, SEQ ID NO:116, SEQ ID NO:118, SEQ ID NO:120, SEQ ID NO:122, SEQ ID NO:124, SEQ ID NO:126, SEQ ID NO:128, SEQ ID NO:130, SEQ ID NO:132, SEQ ID NO:134, SEQ ID NO:136, SEQ ID NO:138, SEQ ID NO:140, SEQ ID NO:142, SEQ ID NO:143, SEQ ID NO:146, SEQ ID NO:148, SEQ ID NO:150, SEQ ID NO:152, SEQ ID NO:154, SEQ ID NO:156, SEQ ID NO:158, SEQ ID NO:160, SEQ ID NO:162, SEQ ID NO:164, SEQ ID NO:166, SEQ ID NO:168, SEQ ID NO:170, SEQ ID NO:172, SEQ ID NO:174, SEQ ID NO:176, SEQ ID NO:178, SEQ ID NO:180, SEQ ID NO:182, SEQ ID NO:184, SEQ ID NO:186, SEQ ID NO:188, SEQ ID NO:190, SEQ ID NO:192, SEQ ID NO:194, SEQ ID NO:196, SEQ ID NO:198, SEQ ID NO:200, SEQ ID NO:202, SEQ ID NO:204, SEQ ID NO:206, SEQ ID NO:209, SEQ ID NO:210, SEQ ID NO:212, SEQ ID NO:214, SEQ ID NO:216, SEQ ID NO:218, SEQ ID NO:220, SEQ ID NO:222, SEQ ID NO:224, SEQ ID NO:226, SEQ ID NO:228, SEQ ID NO:230, SEQ ID NO:232, SEQ ID NO:234, SEQ ID NO:236, SEQ ID NO:238, SEQ ID NO:240, SEQ ID NO:242, SEQ ID NO:244, SEQ ID NO:246, SEQ ID NO:248, SEQ ID NO:250, SEQ ID NO:252, SEQ ID NO:254, SEQ ID NO:256, SEQ ID NO:258, SEQ ID NO:260, SEQ ID NO:262, SEQ ID NO:264, SEQ ID NO:266, SEQ ID NO:268, SEQ ID NO:270, SEQ ID NO:272, SEQ ID NO:274, SEQ ID NO:276, SEQ ID NO:278, SEQ ID NO:280, SEQ ID NO:282, SEQ ID NO:284, SEQ ID NO:286, SEQ ID NO:288, SEQ ID NO:290, SEQ ID NO:292, SEQ ID NO:294, SEQ ID NO:296, SEQ ID NO:298, SEQ ID NO:300, SEQ ID NO:302, SEQ ID NO:304, SEQ ID NO:306, SEQ ID NO:308, SEQ ID NO:310, SEQ ID NO:312, SEQ ID NO:314, SEQ ID NO:316, SEQ ID NO:318, SEQ ID NO:320, SEQ ID NO:322, SEQ ID NO:324, SEQ ID NO:326, SEQ ID NO:328, SEQ ID NO:330, SEQ ID NO:332, SEQ ID NO:334, SEQ ID NO:336, SEQ ID NO:338, SEQ ID NO:340, SEQ ID NO:342, SEQ ID NO:344, SEQ ID NO:346, SEQ ID NO:348, SEQ ID NO:350, SEQ ID NO:352, SEQ ID NO:354, SEQ ID NO:356, SEQ ID NO:358, SEQ ID NO:360, SEQ ID NO:362, SEQ ID NO:364, SEQ ID NO:366, SEQ ID NO:368, SEQ ID NO:371, SEQ ID NO:374, SEQ ID NO:377, SEQ ID NO:380, SEQ ID NO:383, SEQ ID NO:386, SEQ ID NO:389, SEQ ID NO:392, SEQ ID NO:395, SEQ ID NO:398, SEQ ID NO:401, SEQ ID NO:404, SEQ ID NO:407, SEQ ID NO:410, SEQ ID NO:413, SEQ ID NO:416, SEQ ID NO:419, SEQ ID NO:422, SEQ ID NO:424, SEQ ID NO:426, SEQ ID NO:428, SEQ ID NO:430, SEQ ID NO:432, SEQ ID NO:434, SEQ ID NO: 436, SEQ ID NO:438, SEQ ID NO:440, SEQ ID NO:442, SEQ ID NO:444, SEQ ID NO:446, SEQ ID NO:448, SEQ ID NO:450, SEQ ID NO:452, SEQ ID NO:454, SEQ ID NO:456, SEQ ID NO:458, SEQ ID NO:460, SEQ ID NO:462, SEQ ID NO:464, SEQ ID NO:466, SEQ ID NO:468, SEQ ID NO:470 and/or SEQ ID NO:472, SEQ ID NO:473, SEQ ID NO:474, SEQ ID NO:475, SEQ ID NO:476, SEQ ID NO:477, SEQ ID NO:478, SEQ ID NO:479, all the even numbered SEQ ID NOs: between SEQ ID NO:490 and SEQ ID NO:700, SEQ ID NO:719 and/or SEQ ID NO:721, and/or enzymatically active subsequences (fragments) thereof, wherein optionally the lignocellulosic activity comprises a glycosyl transferase, a cellulase, a cellulolytic activity, an endoglucanase, a cellobiohydrolase, a beta-glucosidase, a xylanase, a mannanse, a β-xylosidase or an arabinofuranosidase activity,
and optionally the sequence identities are determined by analysis with a sequence comparison algorithm or by a visual inspection,
and optionally the sequence comparison algorithm comprises a BLAST version 2.2.2 algorithm where a filtering setting is set to blastall-p blastp-d “nr pataa” -F F, and all other options are set to default;
(b) a nucleic acid sequence (a polynucleotide) that hybridizes under stringent conditions to the complement of the nucleic acid of (a), wherein the nucleic acid encodes a polypeptide having a lignocellulosic activity, and optionally the lignocellulosic activity comprises a glycosyl transferase, a cellulase, a cellulolytic activity, an endoglucanase, a cellobiohydrolase, a beta-glucosidase, a xylanase, a mannanse, a β-xylosidase or an arabinofuranosidase activity,
and the stringent conditions comprise a wash step comprising a wash in 0.2×SSC at a temperature of about 65° C. for about 15 minutes;
(c) a nucleic acid sequence encoding a polypeptide having the sequence of SEQ ID NO:2, SEQ ID NO:4, SEQ ID NO:6, SEQ ID NO:8, SEQ ID NO:10, SEQ ID NO:12, SEQ ID NO:14, SEQ ID NO:16, SEQ ID NO:18, SEQ ID NO:20, SEQ ID NO:22, SEQ ID NO:24, SEQ ID NO:26, SEQ ID NO:28, SEQ ID NO:30, SEQ ID NO:32, SEQ ID NO:34, SEQ ID NO:36, SEQ ID NO:38, SEQ ID NO:40, SEQ ID NO:42, SEQ ID NO:44, SEQ ID NO:46, SEQ ID NO:48, SEQ ID NO:50, SEQ ID NO:52, SEQ ID NO:54, SEQ ID NO:56, SEQ ID NO:58, SEQ ID NO:60, SEQ ID NO:62, SEQ ID NO:64, SEQ ID NO:66, SEQ ID NO:68, SEQ ID NO:70, SEQ ID NO:72, SEQ ID NO:74, SEQ ID NO:76, SEQ ID NO:78, SEQ ID NO:80, SEQ ID NO:82, SEQ ID NO:84, SEQ ID NO:86, SEQ ID NO:88, SEQ ID NO:90, SEQ ID NO:92, SEQ ID NO:94, SEQ ID NO:96, SEQ ID NO:98, SEQ ID NO:100, SEQ ID NO:102, SEQ ID NO:104, SEQ ID NO:106, SEQ ID NO:108, SEQ ID NO:110, SEQ ID NO:112, SEQ ID NO:114, SEQ ID NO:116, SEQ ID NO:118, SEQ ID NO:120, SEQ ID NO:122, SEQ ID NO:124, SEQ ID NO:126, SEQ ID NO:128, SEQ ID NO:130, SEQ ID NO:132, SEQ ID NO:134, SEQ ID NO:136, SEQ ID NO:138, SEQ ID NO:140, SEQ ID NO:142, SEQ ID NO:143, SEQ ID NO:146, SEQ ID NO:148, SEQ ID NO:150, SEQ ID NO:152, SEQ ID NO:154, SEQ ID NO:156, SEQ ID NO:158, SEQ ID NO:160, SEQ ID NO:162, SEQ ID NO:164, SEQ ID NO:166, SEQ ID NO:168, SEQ ID NO:170, SEQ ID NO:172, SEQ ID NO:174, SEQ ID NO:176, SEQ ID NO:178, SEQ ID NO:180, SEQ ID NO:182, SEQ ID NO:184, SEQ ID NO:186, SEQ ID NO:188, SEQ ID NO:190, SEQ ID NO:192, SEQ ID NO:194, SEQ ID NO:196, SEQ ID NO:198, SEQ ID NO:200, SEQ ID NO:202, SEQ ID NO:204, SEQ ID NO:206, SEQ ID NO:209, SEQ ID NO:210, SEQ ID NO:212, SEQ ID NO:214, SEQ ID NO:216, SEQ ID NO:218, SEQ ID NO:220, SEQ ID NO:222, SEQ ID NO:224, SEQ ID NO:226, SEQ ID NO:228, SEQ ID NO:230, SEQ ID NO:232, SEQ ID NO:234, SEQ ID NO:236, SEQ ID NO:238, SEQ ID NO:240, SEQ ID NO:242, SEQ ID NO:244, SEQ ID NO:246, SEQ ID NO:248, SEQ ID NO:250, SEQ ID NO:252, SEQ ID NO:254, SEQ ID NO:256, SEQ ID NO:258, SEQ ID NO:260, SEQ ID NO:262, SEQ ID NO:264, SEQ ID NO:266, SEQ ID NO:268, SEQ ID NO:270, SEQ ID NO:272, SEQ ID NO:274, SEQ ID NO:276, SEQ ID NO:278, SEQ ID NO:280, SEQ ID NO:282, SEQ ID NO:284, SEQ ID NO:286, SEQ ID NO:288, SEQ ID NO:290, SEQ ID NO:292, SEQ ID NO:294, SEQ ID NO:296, SEQ ID NO:298, SEQ ID NO:300, SEQ ID NO:302, SEQ ID NO:304, SEQ ID NO:306, SEQ ID NO:308, SEQ ID NO:310, SEQ ID NO:312, SEQ ID NO:314, SEQ ID NO:316, SEQ ID NO:318, SEQ ID NO:320, SEQ ID NO:322, SEQ ID NO:324, SEQ ID NO:326, SEQ ID NO:328, SEQ ID NO:330, SEQ ID NO:332, SEQ ID NO:334, SEQ ID NO:336, SEQ ID NO:338, SEQ ID NO:340, SEQ ID NO:342, SEQ ID NO:344, SEQ ID NO:346, SEQ ID NO:348, SEQ ID NO:350, SEQ ID NO:352, SEQ ID NO:354, SEQ ID NO:356, SEQ ID NO:358, SEQ ID NO:360, SEQ ID NO:362, SEQ ID NO:364, SEQ ID NO:366, SEQ ID NO:368, SEQ ID NO:371, SEQ ID NO:374, SEQ ID NO:377, SEQ ID NO:380, SEQ ID NO:383, SEQ ID NO:386, SEQ ID NO:389, SEQ ID NO:392, SEQ ID NO:395, SEQ ID NO:398, SEQ ID NO:401, SEQ ID NO:404, SEQ ID NO:407, SEQ ID NO:410, SEQ ID NO:413, SEQ ID NO:416, SEQ ID NO:419, SEQ ID NO:422, SEQ ID NO:424, SEQ ID NO:426, SEQ ID NO:428, SEQ ID NO:430, SEQ ID NO:432, SEQ ID NO:434, SEQ ID NO: 436, SEQ ID NO:438, SEQ ID NO:440, SEQ ID NO:442, SEQ ID NO:444, SEQ ID NO:446, SEQ ID NO:448, SEQ ID NO:450, SEQ ID NO:452, SEQ ID NO:454, SEQ ID NO:456, SEQ ID NO:458, SEQ ID NO:460, SEQ ID NO:462, SEQ ID NO:464, SEQ ID NO:466, SEQ ID NO:468, SEQ ID NO:470 and/or SEQ ID NO:472, SEQ ID NO:473, SEQ ID NO:474, SEQ ID NO:475, SEQ ID NO:476, SEQ ID NO:477, SEQ ID NO:478, SEQ ID NO:479, all the even numbered SEQ ID NOs: between SEQ ID NO:490 and SEQ ID NO:700, SEQ ID NO:719 and/or SEQ ID NO:721, or enzymatically active subsequences (fragments) thereof;
(d) the nucleic acid (polynucleotide) of (a), (b) or (c) and encoding a polypeptide having at least one conservative amino acid substitution and retaining its lignocellulosic activity,
wherein optionally the conservative amino acid substitution comprise substituting an amino acid with another amino acid of like characteristics, and optionally a conservative substitution comprises: replacement of an aliphatic amino acid with another aliphatic amino acid; replacement of a Serine with a Threonine or vice versa; replacement of an acidic residue with another acidic residue; replacement of a residue bearing an amide group with another residue bearing an amide group; exchange of a basic residue with another basic residue; or replacement of an aromatic residue with another aromatic residue;
(e) the nucleic acid (polynucleotide) of (a), (b), (c) or (d) encoding a polypeptide having a lignocellulosic activity but lacking a signal sequence, a prepro domain, a dockerin domain, and/or a carbohydrate binding module (CBM),
wherein optionally the carbohydrate binding module (CBM) comprises, or consists of, a cellulose binding module, a lignin binding module, a xylose binding module, a mannanase binding module, a xyloglucan-specific module and/or a arabinofuranosidase binding module;
(f) the nucleic acid (polynucleotide) of (a), (b), (c), (d) or (e) encoding a polypeptide having a lignocellulosic activity further comprising a heterologous sequence;
(g) the nucleic acid (polynucleotide) of (f), wherein the heterologous sequence comprises, or consists of a sequence encoding: (i) a heterologous signal sequence, a heterologous carbohydrate binding module, a heterologous dockerin domain, a heterologous catalytic domain (CD), or a combination thereof; (ii) the sequence of (ii), wherein the heterologous signal sequence, carbohydrate binding module or catalytic domain (CD) is derived from a heterologous lignocellulosic enzyme; or, (iii) a tag, an epitope, a targeting peptide, a cleavable sequence, a detectable moiety or an enzyme;
(h) the nucleic acid (polynucleotide) of (g), wherein the heterologous carbohydrate binding module (CBM) comprises, or consists of, a cellulose binding module, a lignin binding module, a xylose binding module, a mannanase binding module, a xyloglucan-specific module and/or a arabinofuranosidase binding module; or
(i) a nucleic acid sequence (polynucleotide) fully (completely) complementary to (a), (b), (c), (d), (e), (f), (g), or (h).

2-18. (canceled)

19. An isolated, synthetic or recombinant polypeptide comprising
(a) an amino acid sequence having at least 80%, 81%, 82%, 83%, 84%, 85%, 86%, 87%, 88%, 89%, 90%, 91%, 92%, 93%, 94%, 95%, 96%, 97%, 98%, 99%, or more, or complete (100%) sequence identity to SEQ ID NO:2, SEQ ID NO:4, SEQ ID NO:6, SEQ ID NO:8, SEQ ID NO:10, SEQ ID NO:12, SEQ ID NO:14, SEQ ID NO:16, SEQ ID NO:18, SEQ ID NO:20, SEQ ID NO:22, SEQ ID NO:24, SEQ ID NO:26, SEQ ID NO:28, SEQ ID NO:30, SEQ ID NO:32, SEQ ID NO:34, SEQ ID NO:36, SEQ ID NO:38, SEQ ID NO:40, SEQ ID NO:42, SEQ ID NO:44, SEQ ID NO:46, SEQ ID NO:48, SEQ ID NO:50, SEQ ID NO:52, SEQ ID NO:54, SEQ ID NO:56, SEQ ID NO:58, SEQ ID NO:60, SEQ ID NO:62, SEQ ID NO:64, SEQ ID NO:66, SEQ ID NO:68, SEQ ID NO:70, SEQ ID NO:72, SEQ ID NO:74, SEQ ID NO:76, SEQ ID NO:78, SEQ ID NO:80, SEQ ID NO:82, SEQ ID NO:84, SEQ ID NO:86, SEQ ID NO:88, SEQ ID NO:90, SEQ ID NO:92, SEQ ID NO:94, SEQ ID NO:96, SEQ ID NO:98, SEQ ID NO:100, SEQ ID NO:102, SEQ ID NO:104, SEQ ID NO:106, SEQ ID NO:108, SEQ ID NO:110, SEQ ID NO:112, SEQ ID NO:114, SEQ ID NO:116, SEQ ID NO:118, SEQ ID NO:120, SEQ ID NO:122, SEQ ID NO:124, SEQ ID NO:126, SEQ ID NO:128, SEQ ID NO:130, SEQ ID NO:132, SEQ ID NO:134, SEQ ID NO:136, SEQ ID NO:138, SEQ ID NO:140, SEQ ID NO:142, SEQ ID NO:143, SEQ ID NO:146, SEQ ID NO:148, SEQ ID NO:150, SEQ ID NO:152, SEQ ID NO:154, SEQ ID NO:156, SEQ ID NO:158, SEQ ID NO:160, SEQ ID NO:162, SEQ ID NO:164, SEQ ID NO:166, SEQ ID NO:168, SEQ ID NO:170, SEQ ID NO:172, SEQ ID NO:174, SEQ ID NO:176, SEQ ID NO:178, SEQ ID NO:180, SEQ ID NO:182, SEQ ID NO:184, SEQ ID NO:186, SEQ ID NO:188, SEQ ID NO:190, SEQ ID NO:192, SEQ ID NO:194, SEQ ID NO:196, SEQ ID NO:198, SEQ ID NO:200, SEQ ID NO:202, SEQ ID NO:204, SEQ ID NO:206, SEQ ID NO:209, SEQ ID NO:210, SEQ ID NO:212, SEQ ID NO:214, SEQ ID NO:216, SEQ ID NO:218, SEQ ID NO:220, SEQ ID NO:222, SEQ ID NO:224, SEQ ID NO:226, SEQ ID NO:228, SEQ ID NO:230, SEQ ID NO:232, SEQ ID NO:234, SEQ ID NO:236, SEQ ID NO:238, SEQ ID NO:240, SEQ ID NO:242, SEQ ID NO:244, SEQ ID NO:246, SEQ ID NO:248, SEQ ID NO:250, SEQ ID NO:252, SEQ ID NO:254, SEQ ID NO:256, SEQ ID NO:258, SEQ ID NO:260, SEQ ID NO:262, SEQ ID NO:264, SEQ ID NO:266, SEQ ID NO:268, SEQ ID NO:270, SEQ ID NO:272, SEQ ID NO:274, SEQ ID NO:276, SEQ ID NO:278, SEQ ID NO:280, SEQ ID NO:282, SEQ ID NO:284, SEQ ID NO:286, SEQ ID NO:288, SEQ ID NO:290, SEQ ID NO:292, SEQ ID NO:294, SEQ ID NO:296, SEQ ID NO:298, SEQ ID NO:300, SEQ ID NO:302, SEQ ID NO:304, SEQ ID NO:306, SEQ ID NO:308, SEQ ID NO:310, SEQ ID NO:312, SEQ ID NO:314, SEQ ID NO:316, SEQ ID NO:318, SEQ ID NO:320, SEQ ID NO:322, SEQ ID NO:324, SEQ ID NO:326, SEQ ID NO:328, SEQ ID NO:330, SEQ ID NO:332, SEQ ID NO:334, SEQ ID NO:336, SEQ ID NO:338, SEQ ID NO:340, SEQ ID NO:342, SEQ ID NO:344, SEQ ID NO:346, SEQ ID NO:348, SEQ ID NO:350, SEQ ID NO:352, SEQ ID NO:354, SEQ ID NO:356, SEQ ID NO:358, SEQ ID NO:360, SEQ ID NO:362, SEQ ID NO:364, SEQ ID NO:366, SEQ ID NO:368, SEQ ID NO:371, SEQ ID NO:374, SEQ ID NO:377, SEQ ID NO:380, SEQ ID NO:383, SEQ ID NO:386, SEQ ID NO:389, SEQ ID NO:392, SEQ ID NO:395, SEQ ID NO:398, SEQ ID NO:401, SEQ ID NO:404, SEQ ID NO:407, SEQ ID NO:410, SEQ ID NO:413, SEQ ID NO:416, SEQ ID NO:419, SEQ ID NO:422, SEQ ID NO:424, SEQ ID NO:426, SEQ ID NO:428, SEQ ID NO:430, SEQ ID NO:432, SEQ ID NO:434, SEQ ID NO: 436, SEQ ID NO:438, SEQ ID NO:440, SEQ ID NO:442, SEQ ID NO:444, SEQ ID NO:446, SEQ ID NO:448, SEQ ID NO:450, SEQ ID NO:452, SEQ ID NO:454, SEQ ID NO:456, SEQ ID NO:458, SEQ ID NO:460, SEQ ID NO:462, SEQ ID NO:464, SEQ ID NO:466, SEQ ID NO:468, SEQ ID NO:470 and/or SEQ ID NO:472, SEQ ID NO:473, SEQ ID NO:474, SEQ ID NO:475, SEQ ID NO:476, SEQ ID NO:477, SEQ ID NO:478, SEQ ID NO:479, all the even numbered SEQ ID NOs: between SEQ ID NO:490 and SEQ ID NO:700, SEQ ID NO:719 and/or SEQ ID NO:721, or enzymatically active subsequences (fragments) thereof,
wherein polypeptide has a lignocellulosic activity, and optionally the lignocellulosic activity comprises a glycosyl transferase, a cellulase, a cellulolytic activity, an endoglucanase, a cellobiohydrolase, a beta-glucosidase, a xylanase, a mannanse, a β-xylosidase or an arabinofuranosidase activity, wherein optionally the sequence identities are determined by analysis with a sequence comparison algorithm or by a visual inspection, and optionally the sequence comparison algorithm is a BLAST version 2.2.2 algorithm where a filtering setting is set to blastall-p blastp-d “nr pataa” -F F, and all other options are set to default;
(b) an amino acid sequence encoded by the nucleic acid of claim 1, wherein the polypeptide has (i) a lignocellulosic activity, and optionally the lignocellulosic activity comprises a glycosyl transferase, a cellulase, a cellulolytic activity, an endoglucanase, a cellobiohydrolase, a beta-glucosidase, a xylanase, a mannanse, a β-xylosidase or an arabinofuranosidase activity, or, (ii) has immunogenic activity in that it is capable of generating an antibody that specifically binds to a polypeptide having the sequence of SEQ ID NO:2, SEQ ID NO:4, SEQ ID NO:6, SEQ ID NO:8, SEQ ID NO:10, SEQ ID NO:12, SEQ ID NO:14, SEQ ID NO:16, SEQ ID NO:18, SEQ ID NO:20, SEQ ID NO:22, SEQ ID NO:24, SEQ ID NO:26, SEQ ID NO:28, SEQ ID NO:30, SEQ ID NO:32, SEQ ID NO:34, SEQ ID NO:36, SEQ ID NO:38, SEQ ID NO:40, SEQ ID NO:42, SEQ ID NO:44, SEQ ID NO:46, SEQ ID NO:48, SEQ ID NO:50, SEQ ID NO:52, SEQ ID NO:54, SEQ ID NO:56, SEQ ID NO:58, SEQ ID NO:60, SEQ ID NO:62, SEQ ID NO:64, SEQ ID NO:66, SEQ ID NO:68, SEQ ID NO:70, SEQ ID NO:72, SEQ ID NO:74, SEQ ID NO:76, SEQ ID NO:78, SEQ ID NO:80, SEQ ID NO:82, SEQ ID NO:84, SEQ ID NO:86, SEQ ID NO:88, SEQ ID NO:90, SEQ ID NO:92, SEQ ID NO:94, SEQ ID NO:96, SEQ ID NO:98, SEQ ID NO:100, SEQ ID NO:102, SEQ ID NO:104, SEQ ID NO:106, SEQ ID NO:108, SEQ ID NO:110, SEQ ID NO:112, SEQ ID NO:114, SEQ ID NO:116, SEQ ID NO:118, SEQ ID NO:120, SEQ ID NO:122, SEQ ID NO:124, SEQ ID NO:126, SEQ ID NO:128, SEQ ID NO:130, SEQ ID NO:132, SEQ ID NO:134, SEQ ID NO:136, SEQ ID NO:138, SEQ ID NO:140, SEQ ID NO:142, SEQ ID NO:143, SEQ ID NO:146, SEQ ID NO:148, SEQ ID NO:150, SEQ ID NO:152, SEQ ID NO:154, SEQ ID NO:156, SEQ ID NO:158, SEQ ID NO:160, SEQ ID NO:162, SEQ ID NO:164, SEQ ID NO:166, SEQ ID NO:168, SEQ ID NO:170, SEQ ID NO:172, SEQ ID NO:174, SEQ ID NO:176, SEQ ID NO:178, SEQ ID NO:180, SEQ ID NO:182, SEQ ID NO:184, SEQ ID NO:186, SEQ ID NO:188, SEQ ID NO:190, SEQ ID NO:192, SEQ ID NO:194, SEQ ID NO:196, SEQ ID NO:198, SEQ ID NO:200, SEQ ID NO:202, SEQ ID NO:204, SEQ ID NO:206, SEQ ID NO:209, SEQ ID NO:210, SEQ ID NO:212, SEQ ID NO:214, SEQ ID NO:216, SEQ ID NO:218, SEQ ID NO:220, SEQ ID NO:222, SEQ ID NO:224, SEQ ID NO:226, SEQ ID NO:228, SEQ ID NO:230, SEQ ID NO:232, SEQ ID NO:234, SEQ ID NO:236, SEQ ID NO:238, SEQ ID NO:240, SEQ ID NO:242, SEQ ID NO:244, SEQ ID NO:246, SEQ ID NO:248, SEQ ID NO:250, SEQ ID NO:252, SEQ ID NO:254, SEQ ID NO:256, SEQ ID NO:258, SEQ ID NO:260, SEQ ID NO:262, SEQ ID NO:264, SEQ ID NO:266, SEQ ID NO:268, SEQ ID NO:270, SEQ ID NO:272, SEQ ID NO:274, SEQ ID NO:276, SEQ ID NO:278, SEQ ID NO:280, SEQ ID NO:282, SEQ ID NO:284, SEQ ID NO:286, SEQ ID NO:288, SEQ ID NO:290, SEQ ID NO:292, SEQ ID NO:294, SEQ ID NO:296, SEQ ID NO:298, SEQ ID NO:300, SEQ ID NO:302, SEQ ID NO:304, SEQ ID NO:306, SEQ ID NO:308, SEQ ID NO:310, SEQ ID NO:312, SEQ ID NO:314, SEQ ID NO:316, SEQ ID NO:318, SEQ ID NO:320, SEQ ID NO:322, SEQ ID NO:324, SEQ ID NO:326, SEQ ID NO:328, SEQ ID NO:330, SEQ ID NO:332, SEQ ID NO:334, SEQ ID NO:336, SEQ ID NO:338, SEQ ID NO:340, SEQ ID NO:342, SEQ ID NO:344, SEQ ID NO:346, SEQ ID NO:348, SEQ ID NO:350, SEQ ID NO:352, SEQ ID NO:354, SEQ ID NO:356, SEQ ID NO:358, SEQ ID NO:360, SEQ ID NO:362, SEQ ID NO:364, SEQ ID NO:366, SEQ ID NO:368, SEQ ID NO:371, SEQ ID NO:374, SEQ ID NO:377, SEQ ID NO:380, SEQ ID NO:383, SEQ ID NO:386, SEQ ID NO:389, SEQ ID NO:392, SEQ ID NO:395, SEQ ID NO:398, SEQ ID NO:401, SEQ ID NO:404, SEQ ID NO:407, SEQ ID NO:410, SEQ ID NO:413, SEQ ID NO:416, SEQ ID NO:419, SEQ ID NO:422, SEQ ID NO:424, SEQ ID NO:426, SEQ ID NO:428, SEQ ID NO:430, SEQ ID NO:432, SEQ ID NO:434, SEQ ID NO: 436, SEQ ID NO:438, SEQ ID NO:440, SEQ ID NO:442, SEQ ID NO:444, SEQ ID NO:446, SEQ ID NO:448, SEQ ID NO:450, SEQ ID NO:452, SEQ ID NO:454, SEQ ID NO:456, SEQ ID NO:458, SEQ ID NO:460, SEQ ID NO:462, SEQ ID NO:464, SEQ ID NO:466, SEQ ID NO:468, SEQ ID NO:470 and/or SEQ ID NO:472, SEQ ID NO:473, SEQ ID NO:474, SEQ ID NO:475, SEQ ID NO:476, SEQ ID NO:477, SEQ ID NO:478, SEQ ID NO:479, all the even numbered SEQ ID NOs: between SEQ ID NO:490 and SEQ ID NO:700, SEQ ID NO:719 and/or SEQ ID NO:721, and/or enzymatically active subsequences (fragments) thereof;
(c) the amino acid sequence of (a) or (b), and comprising at least one amino acid residue conservative substitution,
(d) the amino acid sequence of (c), wherein the conservative substitution comprises replacement of an aliphatic amino acid with another aliphatic amino acid; replacement of a serine with a threonine or vice versa; replacement of an acidic residue with another acidic residue; replacement of a residue bearing an amide group with another residue bearing an amide group; exchange of a basic residue with another basic residue; or, replacement of an aromatic residue with another aromatic residue, or a combination thereof,
and optionally the aliphatic residue comprises Alanine, Valine, Leucine, Isoleucine or a synthetic equivalent thereof; the acidic residue comprises Aspartic acid, Glutamic acid or a synthetic equivalent thereof; the residue comprising an amide group comprises Aspartic acid, Glutamic acid or a synthetic equivalent thereof; the basic residue comprises Lysine, Arginine or a synthetic equivalent thereof; or, the aromatic residue comprises Phenylalanine, Tyrosine or a synthetic equivalent thereof;
(e) the polypeptide of (a), (b), (c) or (d) having a lignocellulosic activity but lacking a signal sequence, a prepro domain, a dockerin domain, and/or a carbohydrate binding module (CBM),
wherein optionally the carbohydrate binding module (CBM) comprises, or consists of, a cellulose binding module, a lignin binding module, a xylose binding module, a mannanase binding module, a xyloglucan-specific module and/or a arabinofuranosidase binding module;
(f) the polypeptide of (a), (b), (c), (d) or (e) having a lignocellulosic activity further comprising a heterologous sequence;
(g) the polypeptide of (f), wherein the heterologous sequence comprises, or consists of: (i) a heterologous signal sequence, a heterologous carbohydrate binding module, a heterologous dockerin domain, a heterologous catalytic domain (CD), or a combination thereof; (ii) the sequence of (ii), wherein the heterologous signal sequence, carbohydrate binding module or catalytic domain (CD) is derived from a heterologous lignocellulosic enzyme; and/or, (iii) a tag, an epitope, a targeting peptide, a cleavable sequence, a detectable moiety or an enzyme; or
(h) the polypeptide of (g), wherein the heterologous carbohydrate binding module (CBM) comprises, or consists of, a cellulose binding module, a lignin binding module, a xylose binding module, a mannanase binding module, a xyloglucan-specific module and/or a arabinofuranosidase binding module; or (i) the polypeptide of any of (a) to (g), wherein the the polypeptide comprises at least one glycosylation site, and optionally the glycosylation site is an N-linked glycosylation, and optionally the polypeptide is glycosylated after being expressed in a P. Pastoris or a S. pombe.

20-101. (canceled)

102. A nucleic acid probe for identifying a nucleic acid encoding a polypeptide with a lignocellulosic activity, wherein the probe comprises
(a) at least 20, 30, 40, 50, 60, 75, 100, 125, 150, or 200 or more consecutive bases of the nucleic acid sequence (polynucleotide) of claim 1, wherein the probe identifies the nucleic acid by binding or hybridization;
(b) the probe of (a), wherein the probe comprises an oligonucleotide comprising at least about 10 to 50, about 20 to 60, about 30 to 70, about 40 to 80, about 60 to 100, or about 50 to 150 consecutive bases;
(c) the probe of (a) or (b) further comprising a detectable agent; or
(d) the probe of (c), wherein the detectable agent comprises a radioactive isotope, a fluorescent dye or an enzyme capable of catalyzing the formation of a detectable product.

103. An expression cassette, vector or cloning vehicle comprising a nucleic acid comprising the nucleic acid sequence of claim 1, wherein optionally the cloning vehicle comprises a viral vector, a plasmid, a phage, a phagemid, a cosmid, a fosmid, a bacteriophage or an artificial chromosome, and optionally the viral vector comprises an adenovirus vector, a retroviral vector or an adeno-associated viral vector, and optionally the cloning vehicle comprises a bacterial artificial chromosome (BAC), a plasmid, a bacteriophage P1-derived vector (PAC), a yeast artificial chromosome (YAC), or a mammalian artificial chromosome (MAC).

104. A transformed, infected, transformed or host cell comprising
(a) a nucleic acid comprising the nucleic acid sequence of claim 1;
(b) the cell of (a), wherein the cell is a bacterial cell, a mammalian cell, a fungal cell, a yeast cell, an insect cell or a plant cell;
(c) the plant cell of (b), wherein the plant cell is derived from a plant of the genera Anacardium, Arachis, Asparagus, Atropa, Avena, Brassica, Citrus, Citrullus, Capsicum, Carthamus, Cocos, Coffea, Cruciferae, Cucumis, Cucurbita, Daucus, Elaeis, Fragaria, Glycine, Gossypium, Helianthus, Heterocallis, Hordeum, Hyoscyamus, Lactuca, Linum, Lolium, Lupinus, Lycopersicon, Malus, Manihot, Majorana, Medicago, Nicotiana, Olea, Oryza, Panieum, Pannisetum, Persea, Phaseolus, Pistachia, Pisum, Pyrus, Prunus, Raphanus, Ricinus, Secale, Senecio, Sinapis, Solanum, Sorghum, Theobromus, Trigonella, Triticum, Vicia, Vitis, Vigna or Zea; or
(d) the plant cell of (b), wherein the plant cell is derived from a corn plant, a sorghum plant, a potato plant, a tomato plant, a wheat plant, an oilseed plant, a rapeseed plant, a soybean plant, a rice plant, a barley plant, a grass, or a tobacco plant.

105. A transgenic non-human animal, plant, plant part or seed comprising the nucleic acid sequence of claim 1, wherein optionally the transgenic non-human animal is a mouse, rat, pig, cow or goat, wherein optionally the plant, plant part or seed is or is of a corn plant, a sorghum plant, a potato plant, a tomato plant, a wheat plant, an oilseed plant, a rapeseed plant, a soybean plant, a rice plant, a barley plant, a palm, a sunflower plant, a sesame plant, a rice, a peanut plant, a grass, or a tobacco plant, wherein optionally the plant, plant part or seed is or is of the genera Anacardium, Arachis, Asparagus, Atropa, Avena, Brassica, Citrus, Citrullus, Capsicum, Carthamus, Cocos, Coffea, Cruciferae, Cucumis, Cucurbita, Daucus, Elaeis, Fragaria, Glycine, Gossypium, Helianthus, Heterocallis, Hordeum, Hyoscyamus, Lactuca, Linum, Lolium, Lupinus, Lycopersicon, Malus, Manihot, Majorana, Medicago, Nicotiana, Olea, Oryza, Panieum, Pannisetum, Persea, Phaseolus, Pistachia, Pisum, Pyrus, Prunus, Raphanus, Ricinus, Secale, Senecio, Sinapis, Solanum, Sorghum, Theobromus, Trigonella, Triticum, Vicia, Vitis, Vigna or Zea.

106. A method of producing a recombinant polypeptide comprising:
(A) (a) providing a nucleic acid, wherein the nucleic acid comprises the nucleic acid sequence of claim 1; and
(b) expressing the nucleic acid of (a) under conditions that allow expression of the polypeptide, thereby producing a recombinant polypeptide; or
(B) the method of (A), wherein the method further comprises transforming a host cell with the nucleic acid of (a) followed by expressing the nucleic acid of (a), thereby producing a recombinant polypeptide in a transformed cell; or
(C) the method of (A) or (B), wherein the promoter is or comprises: a viral, bacterial, mammalian or plant promoter; or, a plant promoter; or, a potato, rice, corn, wheat, tobacco or barley promoter; or, a constitutive promoter or a CaMV35S promoter; or, an inducible promoter; or, a tissue-specific promoter or an environmentally regulated or a developmentally regulated promoter; or, a seed-specific, a leaf-specific, a root-specific, a stem-specific or an abscission-induced promoter; or, a seed preferred promoter, a maize gamma zein promoter or a maize ADP-gpp promoter.

107. A method of generating a variant of a nucleic acid encoding a polypeptide with a lignocellulosic activity comprising:
(I) (a) providing a template nucleic acid comprising the nucleic acid sequence of claim 1; and
(b) modifying, deleting or adding one or more nucleotides in the template sequence, or a combination thereof, to generate a variant of the template nucleic acid
wherein optionally the method further comprises expressing the variant nucleic acid to generate a variant polypeptide with a lignocellulosic activity,
and optionally the modifications, additions or deletions are introduced by a method comprising error-prone PCR, shuffling, oligonucleotide-directed mutagenesis, assembly PCR, sexual PCR mutagenesis, in vivo mutagenesis, cassette mutagenesis, recursive ensemble mutagenesis, exponential ensemble mutagenesis, site-specific mutagenesis, gene reassembly, Gene Site Saturation Mutagenesis (GSSM), synthetic ligation reassembly (SLR), recombination, recursive sequence recombination, phosphothioate-modified DNA mutagenesis, uracil-containing template mutagenesis, gapped duplex mutagenesis, point mismatch repair mutagenesis, repair-deficient host strain mutagenesis, chemical mutagenesis, radiogenic mutagenesis, deletion mutagenesis, restriction-selection mutagenesis, restriction-purification mutagenesis, artificial gene synthesis, ensemble mutagenesis, chimeric nucleic acid multimer creation and a combination thereof
and optionally the method is iteratively repeated until a lignocellulosic enzyme having an altered or different activity or an altered or different stability from that of a polypeptide encoded by the template nucleic acid is produced; or
(II) the method of (I), wherein the polypeptide encoded by the variant nucleic acid (a) is thermotolerant, and retains some activity after being exposed to an elevated temperature; (b) has increased glycosylation as compared to the lignocellulosic enzyme encoded by a template nucleic acid; or, (c) has a lignocellulosic activity under a high temperature, wherein the lignocellulosic enzyme encoded by the template nucleic acid is not active under the high temperature.

108. A method for modifying codons in a nucleic acid encoding a lignocellulosic enzyme, the method comprising:
(a) providing a nucleic acid encoding a polypeptide with a lignocellulosic activity comprising the nucleic acid sequence of claim 1; and,
(b) identifying a codon in the nucleic acid of (a) and replacing it with a different codon encoding the same amino acid as the replaced codon, thereby modifying codons in a nucleic acid encoding a lignocellulosic enzyme.

109. A chimeric polypeptide comprising
(a) at least a first domain comprising a signal sequence (signal peptide (SP)) or leader sequence as set forth in the amino terminal residues 1 to 12, 1 to 13, 1 to 14, 1 to 15, 1 to 16, 1 to 17, 1 to 18, 1 to 19, 1 to 20, 1 to 21, 1 to 22, 1 to 23, 1 to 24, 1 to 25, 1 to 26, 1 to 27, 1 to 28, 1 to 28, 1 to 30, 1 to 31, 1 to 32, 1 to 33, 1 to 34, 1 to 35, 1 to 36, 1 to 37, 1 to 38, 1 to 40, 1 to 41, 1 to 42, 1 to 43 or 1 to 44, of (a) a polypeptide of claim 19, and at least a second domain comprising a heterologous polypeptide or peptide, wherein the heterologous polypeptide or peptide is not naturally associated with the signal peptide (SP) or leader sequence,
and optionally the heterologous polypeptide or peptide is not a lignocellulosic enzyme, and optionally the heterologous polypeptide or peptide is amino terminal to, carboxy terminal to or on both ends of the signal peptide (SP) or leader sequence;
(b) a first domain and at least a second domain, wherein the first domain comprises a polypeptide of claim 19, and the second domain comprises at least one heterologous or modified carbohydrate binding domain (CBM), at least one internally rearranged CBM, a heterologous or modified dockerin domain, a heterologous or modified prepro domain, or a heterologous or modified active site;
(c) the chimeric polypeptide of (b), wherein the heterologous or modified or internally rearranged CBM and comprises, or consists of, a CBM_{—}1, CBM_{—}2, CBM_{—}2a, CBM_{—}2b, CBM_{—}3, CBM_{—}3a, CBM_{—}3b, CBM_{—}3c, CBM_{—}4, CBM_{—}5, CBM_{—}5_{—}12, CBM_{—}6, CBM_{—}7, CBM_{—}8, CBM_{—}9, CBM_{—}10, CBM_{—}11, CBM_{—}12, CBM_{—}13, CBM_{—}14, CBM_{—}15, CBM_{—}16 or any of the CBMs from a CMB family of CBM_{—}1 to CBM_{—}48; a glycosyl hydrolase binding domain; a CBM as set forth in Table 5 or Table 6; or, any combination thereof;
(d) the chimeric polypeptide of (b) or (c), wherein the at least one carbohydrate binding domain (CBM) is a cellulose-binding module or a lignin-binding domain;
(e) the chimeric polypeptide of (a), (b), or (c), wherein the at least one CBM is positioned approximate to the polypeptide's catalytic domain;
(f) the chimeric polypeptide of (e), wherein the at least one CBM is positioned: approximate to the C-terminus of the polypeptide's catalytic domain, or, approximate to the N-terminus of the polypeptide's catalytic domain, or both; or
(g) the chimeric polypeptide of any of (a), (b), (c), (d), (e), or (f), wherein the chimeric polypeptide is a recombinant chimeric protein.

110. A composition or product of manufacture comprising
(a) a mixture (or “cocktail”) of lignocellulosic enzymes comprising: (i) at least one of each of a endoglucanase, cellobiohydrolase I (CBH I), cellobiohydrolase II (CBH II) and β-glucosidase; (ii) at least one of each of an xylanase, β-xylosidase and arabinofuranosidase; or, (iii) a combination of at least one of (i) or (ii); wherein the mixture of (a) comprises at least one enzyme of claim 19;
(b) a mixture (or “cocktail”) of hemicellulose- and cellulose-hydrolyzing enzymes comprising: (i) at least one of each of a endoglucanase, lignocellulosic enzyme, cellobiohydrolase I (CBH I), cellobiohydrolase II (CBH II), arabinofuranosidase and xylanase; (ii) the mixture of (i), wherein the glucose oxidase is a glucose oxidase-1 or β-glucosidase; or (iii) the mixture of (i) or (ii), wherein the glucose oxidase is a glucose oxidase-2 or β-xylosidase; wherein the mixture of (b) comprises at least one enzyme of claim 19;
(c) a mixture (or “cocktail”) of hemicellulose- and cellulose-hydrolyzing enzymes comprising: at least one of each of a endoglucanase; a cellobiohydrolase I (CBH I); a cellobiohydrolase II (CBH II); an arabinofuranosidase; a xylanase; a glucose oxidase-1 (a β-glucosidase); and, a glucose oxidase-2 or β-xylosidase; wherein the mixture of (c) comprises at least one enzyme of claim 19;
(d) a mixture (or “cocktail”) of enzymes comprising: (1) an endoglucanase which cleaves internal β-1,4 linkages resulting in shorter glucooligosaccharides, (2) a cellobiohydrolase which acts in an “exo” manner processively releasing cellobiose units (β-1,4 glucose-glucose disaccharide), and (3) a β-glucosidase for releasing glucose monomer from short cellooligosaccharides (e.g. cellobiose); wherein the mixture of (d) comprises at least one enzyme of claim 19;
(e) a mixture (or “cocktail”) of enzymes comprising: SEQ ID NO:34, SEQ ID NO:360, SEQ ID NO:358, and SEQ ID NO:371; or, SEQ ID NO:358, SEQ ID NO:360, SEQ ID NO:168; or, SEQ ID NO:34, SEQ ID NO:360, SEQ ID NO:214; or, SEQ ID NO:360, SEQ ID NO:90, SEQ ID NO:358;
(f) a mixture (or “cocktail”) of enzymes comprising a combination of enzymes as set forth in Table 4;
(g) the composition or product of manufacture of any of (a) to (f), wherein the endoglucanase comprises SEQ ID NO:4, the cellobiohydrolase I comprises SEQ ID NO:16, SEQ ID NO:30 or SEQ ID NO:356, the cellobiohydrolase II comprises SEQ ID NO:282, the β-glucosidase comprises SEQ ID NO:124, the xylanase comprises SEQ ID NO:262, or any combination thereof, or
(h) the composition or product of manufacture of any of (a) to (g), wherein at least one enzyme comprises an additional carbohydrate binding domain (CBM).

111. A mixture or cocktail of enzymes comprising
(a) a polypeptide of claim 19 or a chimeric polypeptide of claim 109;
(b) a combination of enzymes as set forth in Table 4;
(c) at least one of each of a endoglucanase, cellobiohydrolase I (CBH I), cellobiohydrolase II (CBH II) and β-glucosidase; (ii) at least one of each of an xylanase, β-xylosidase and arabinofuranosidase; or, (iii) a combination of at least one of (i) or (ii); wherein the mixture comprises at least one enzyme of claim 19;
(d) a mixture (or “cocktail”) of enzymes comprising hemicellulose- and cellulose-hydrolyzing enzymes, wherein the cellulose-hydrolyzing enzymes comprise at least one glucose oxidase, endoglucanase, cellobiohydrolase I, cellobiohydrolase II and β-glucosidase; and the hemicellulose-hydrolyzing enzymes comprise at least one xylanase, β-xylosidase and arabinofuranosidase;
(e) at least one hemicellulose- and/or cellulose-hydrolyzing enzyme comprising: (i) at least one of each of a endoglucanase, glucose oxidase, cellobiohydrolase I (CBH I), cellobiohydrolase II (CBH II), arabinofuranosidase and xylanase; (ii) the mixture of (i), wherein the glucose oxidase is a glucose oxidase-1 or β-glucosidase; and/or (iii) the mixture of (i) or (ii), wherein the glucose oxidase is a glucose oxidase-2 or β-xylosidase; wherein the mixture comprises at least one enzyme of claim 19;
(f) at least one hemicellulose- and/or cellulose-hydrolyzing enzyme comprising: at least one of each of a endoglucanase; a cellobiohydrolase I (CBH I); a cellobiohydrolase II (CBH II); an arabinofuranosidase; a xylanase; a glucose oxidase-1 (a β-glucosidase); and/or, a glucose oxidase-2 or β-xylosidase; wherein the mixture of (c) comprises at least one enzyme of claim 19;
(g) at least one (1) endoglucanase which cleaves internal β-1,4 linkages resulting in shorter glucooligosaccharides, (2) cellobiohydrolase which acts in an “exo” manner processively releasing cellobiose units (β-1,4 glucose-glucose disaccharide), and/or (3) β-glucosidase for releasing glucose monomer from short cellooligosaccharides (e.g. cellobiose); wherein the mixture of (d) comprises at least one enzyme of claim 19; or
(h) the enzyme combination SEQ ID NO:34, SEQ ID NO:360, SEQ ID NO:358, and SEQ ID NO:371; or, SEQ ID NO:358, SEQ ID NO:360, SEQ ID NO:168; or, SEQ ID NO:34, SEQ ID NO:360, SEQ ID NO:214; or, SEQ ID NO:360, SEQ ID NO:90, SEQ ID NO:358.

112. A composition comprising a polypeptide of claim 19, a chimeric polypeptide of claim 109, a composition or product of manufacture of claim 110, or a mixture or cocktail of enzymes of claim 111, wherein optionally the composition is a pharmaceutical composition, a detergent composition, a contact lens solution, a waste treatment composition, a disinfectant, biodefense or bio-detoxifying agent, or wherein optionally the composition is a fuel, wherein optionally the composition is an alcohol, wherein optionally the alcohol is ethanol, or wherein optionally the composition is a biomass or a biomass material, a paper, paper waste, recycled paper product, paper pulp, paper product, wood, wood product, wood pulp, wood waste, textile, fabric, yarn, or fiber, or wherein optionally the composition is a cellulose- or a cellulose derivative-composition, or wherein optionally the composition is a beverage, a food, a feed, a food or feed supplement, a dairy product or a nutritional supplement, a dietary supplement, an edible enzyme delivery matrix or pellet, or wherein optionally the food is a dough, a bread or a baked product, or wherein optionally the biomass material is derived from an agricultural crop, or the biomass material is a byproduct of a food or a feed production, or the biomass material is a waste product, or the biomass material is a plant residue or a waste paper or waste paper product, or the biomass material comprises a plant residue, and optionally the plant residue comprises stems, leaves, hulls, husks, corn cobs, corn stover, straw, wood, wood chips, wood pulp and/or sawdust, and optionally the paper waste comprises discarded or used photocopy paper, computer printer paper, notebook paper, notepad paper, typewriter paper, newspapers, magazines, cardboard and paper-based packaging materials.

113. A method for hydrolyzing, breaking up or disrupting a cellooligsaccharide, an arabinoxylan oligomer, or a lignocellulose-, lignin-, xylan-, glucan- or cellulose-comprising composition comprising:
(A)(a) providing a polypeptide of claim 19, a chimeric polypeptide of claim 109, a composition or product of manufacture of claim 110, or a mixture or cocktail of enzymes of claim 111;
(b) providing a composition comprising a lignocellulose, lignin, xylan, cellulose and/or glucan; and
(c) contacting the polypeptide of (a) with the composition of (b) under conditions wherein the lignocellulosic enzyme hydrolyzes, breaks up or disrupts the lignin-, xylan-, cellooligsaccharide, arabinoxylan oligomer, or glucan- or cellulose-comprising composition;
(B) the method of (A), wherein the composition comprises a plant cell, a bacterial cell, a yeast cell, an insect cell, or an animal cell,
(C) the method of (A) or (B), wherein the polypeptide has glycosyl hydrolase, endoglucanase, cellobiohydrolase, beta-glucosidase, xylanase, mannanase, β-xylosidase and/or arabinofuranosidase activity;
(D) the method of (A), (B) or (C), wherein the polypeptide of (A)(a) is a recombinant polypeptide;
(E) the method of (D), wherein the recombinant polypeptide is produced as a heterologous recombinant polypeptide within the lignocellulose-, xylan-, lignin-, glucan- or cellulose-comprising composition to be hydrolyzed;
(F) the method of (D), wherein the recombinant polypeptide is produced by expression of a heterologous polynucleotide encoding the recombinant polypeptide in a bacterium, a yeast, a plant, an insect, a fungus and an animal, and optionally the organism is selected from the group consisting of an S. pombe, S. cerevisiae, Pichia pastoris, E. coli, Streptomyces sp., Bacillus sp. or a Lactobacillus sp.; or
(G) the methods of (A) to (F), wherein the lignocellulose-, lignin-, xylan-, glucan- or cellulose-comprising composition comprises: a monocot or dicot plant or plant product; or, a monocot corn, sugarcane, rice, wheat, barley, switchgrass or Miscanthus; or a dicot oilseed crop, soy, canola, rapeseed, flax, cotton, palm oil, sugar beet, peanut, tree, poplar or lupine.

114. A method for making a fuel comprising
(A) contacting a composition comprising a cellooligsaccharide, an arabinoxylan oligomer, a lignin, a lignocellulose, a xylan, a glucan, a cellulose or a fermentable sugar with the polypeptide of claim 19, chimeric polypeptide of claim 109, a composition or product of manufacture of claim 110, or a mixture of cocktail of enzymes of claim 111;
(B) the method of (A), wherein the composition comprising the cellooligsaccharide, arabinoxylan oligomer, lignin, lignocellulose, xylan, glucan, cellulose or fermentable sugar comprises a plant, plant product or plant derivative;
(C) the method of (A) or (B), wherein the plant or plant product comprises cane sugar plants or plant products, beets or sugarbeets, wheat, corn, soybeans, potato, rice or barley;
(D) the method of (C), wherein the plant is a monocot or dicot, or the plant is a monocot corn, sugarcane, rice, wheat, barley, switchgrass or Miscanthus; or the plant is a dicot oilseed crop, soy, canola, rapeseed, flax, cotton, palm oil, sugar beet, peanut, tree, poplar or lupine;
(E) the method of (A), (B), (C) or (D), wherein the polypeptide has activity comprising cellulase, endoglucanase, cellobiohydrolase, beta-glucosidase, xylanase, mannanase, β-xylosidase and/or arabinofuranosidase activity, wherein optionally the composition further comprises a glucose oxidase, a glucose oxidase-1 (a β-glucosidase) or a glucose oxidase-2 (a β-xylosidase); or
(F) the method of (A), (B), (C), (D) or (E), further comprising processing and/or formulating the fuel as a liquid and/or a gas, wherein optionally the fuel comprises a biofuel and/or a synthetic fuel, or the fuel comprises bioethanol, biomethanol, biopropanol and/or, bio-butanol; and/or a gasoline-ethanol, -methanol, -butanol and/or -propanol mix.

115. A method for processing a biomass material comprising contacting a biomass material with the polypeptide of claim 19, a chimeric polypeptide of claim 109, a mixture or cocktail of enzymes of claim 110, or a composition or product of manufacture of claim 111,
wherein optionally the biomass material is derived from an agricultural crop, is a byproduct of a food or a feed production, is a lignocellulosic waste product, or is a plant material, plant byproduct of a process or plant residue or a waste paper or waste paper product,
and optionally the plant material or plant residue comprises sugar cane bagasse, stems, leaves, hulls, husks, corn or corn cobs, corn stover, hay, straw, wood, wood chips, wood pulp, paper waste, wood waste and sawdust,
and optionally the paper waste comprises discarded or used photocopy paper, computer printer paper, notebook paper, notepad paper, typewriter paper, newspapers, magazines, cardboard and paper-based packaging materials,
and optionally further processing the biomass material to generate a bioalcohol, a bioethanol, biomethanol, biobutanol or biopropanol.

116. An isolated, synthetic and/or recombinant carbohydrate binding domain-module (CBM) comprising, or consisting of
(a) a carbohydrate binding domain-module (CBM) motif comprising, or consisting of, a subsequence of the polypeptide of claim 19, wherein the carbohydrate binding domain-module (CBM) comprises or consists of a CBM_{—}1, CBM_{—}2, CBM_{—}2a, CBM_{—}2b, CBM_{—}3, CBM_{—}3a, CBM_{—}3b, CBM_{—}3c, CBM_{—}4, CBM_{—}5, CBM_{—}5_{—12,} CBM_{—}6, CBM_{—}7, CBM_{—}8, CBM_{—}9, CBM_{—}10, CBM_{—}11, CBM_{—}12, CBM_{—}13, CBM_{—}14, CBM_{—}15, CBM_{—}16 or any of the CBMs from a CMB family of CBM_{—}1 to CBM_{—}48;
(b) at least one carbohydrate binding domain-module (CBM) as set forth in Table 5, and the Sequence Listing;
(c) at least one carbohydrate binding domain-module (CBM) as set forth in Table 6, and the Sequence Listing; or
(d) a combination thereof.

117. A method of treating or modifying a composition comprising contacting a composition with a polypeptide as set forth in claim 19, a chimeric polypeptide of claim 109, a composition or product of manufacture of claim 110, or a mixture or cocktail of enzymes of claim 111, wherein optionally the composition is a pharmaceutical composition, a detergent composition, a contact lens solution, a waste treatment composition, a disinfectant, biodefense or bio-detoxifying agent, or wherein optionally the composition is a fuel, wherein optionally the composition is an alcohol, wherein optionally the alcohol is ethanol, or wherein optionally the composition is a biomass or a biomass material, a paper, paper waste, recycled paper product, paper pulp, paper product, wood, wood product, wood pulp, wood waste, textile, fabric, yarn, or fiber, or wherein optionally the composition is a cellulose- or a cellulose derivative-composition, or wherein optionally the composition is a beverage, a food, a feed, a food or feed supplement, a dairy product or a nutritional supplement, a dietary supplement, an edible enzyme delivery matrix or pellet, or wherein optionally the food is a dough, a bread or a baked product, or wherein optionally the biomass material is derived from an agricultural crop, or the biomass material is a byproduct of a food or a feed production, or the biomass material is a waste product, or the biomass material is a plant residue or a waste paper or waste paper product, or the biomass material comprises a plant residue, and optionally the plant residue comprises stems, leaves, hulls, husks, corn cobs, corn stover, straw, wood, wood chips, wood pulp and/or sawdust, and optionally the paper waste comprises discarded or used photocopy paper, computer printer paper, notebook paper, notepad paper, typewriter paper, newspapers, magazines, cardboard and paper-based packaging materials.

118. An immobilized polypeptide or enzyme, or an immobilized nucleic acid, wherein the polypeptide comprises the sequence of claim 19, or the nucleic acid comprises the nucleic acid sequence of claim 1, wherein optionally the polypeptide or nucleic acid is immobilized on a cell, a metal, a resin, a polymer, a ceramic, a glass, a microelectrode, a graphitic particle, a bead, a gel, a plate, an array or a capillary tube.

119. An isolated, synthetic or recombinant antibody that specifically binds to the polypeptide of claim 19, wherein optionally the antibody is a monoclonal or a polyclonal antibody.

120. A method of isolating or recovering a nucleic acid encoding a polypeptide with a lignocellulosic activity from a sample comprising:
(a) providing a polynucleotide probe comprising, or consisting of, the nucleic acid sequence of claim 1, or the probe of claim 102;
(b) isolating a nucleic acid from the sample or treating the sample such that nucleic acid in the sample is accessible for hybridization to the polynucleotide probe of (a);
(c) combining the isolated nucleic acid or the treated sample of (b) with the polynucleotide probe of (a); and
(d) isolating a nucleic acid that specifically hybridizes with the polynucleotide probe of (a), thereby isolating or recovering a nucleic acid encoding a polypeptide with a lignocellulosic activity from an sample;
wherein optionally the sample is an environmental sample, or optionally the sample comprises a water sample, a liquid sample, a soil sample, an air sample or a biological sample, and optionally the biological sample is derived from a bacterial cell, a protozoan cell, an insect cell, a yeast cell, a plant cell, a fungal cell or a mammalian cell.

The application's sequence listing, which the Patent Office published only in electronic form, follows.

SEQUENCE LISTING (721 sequences)

SEQ ID NO: 1 - DNA, 3450 bp, Unknown
  Obtained from environmental sample
atgtctcgtaatattaggaaaagttcattcattttttctctgctgacgatcattgtattgattgccagcatgttcctgcaaacccaaacggcacaggcaatcagcactccctggttgagcacctctggcagattcatccgggatccgcagggcaataatgtcgttctgcgaggtgtctcgctggtggatattggtgaggtgaaccttgggcggacgcgcaatgtcagccagctgattaatatggcgaccaatgaagccgatggctggtatgcgcgtgtagtgcgcctgccagtctatccgaatgcgattgatagttcgcctggctggctggcaaacccggatgcttatttcaataaccatctcaacccagctattcagaactgtgtggcgcgccagatctactgcatcatcgactggcactatatcgcggactataacaacagcacgattgacacaaacacacgcgccttctggaactatgtggcgccacgttatgctaatactccgaatgtaatcttcgagttgtacaatgaaccagtcaaccctgataactggtcaacgtggaagcaatgggcgcaaccctgggtcgatatcattcgctctcatgcgccgaacaacttgatcctgatcggtggtccgcgctggtcgcagaatctttcgagcgcggcgagcagtccatttactggcagtaatcttgtgtatgttgctcacatttatcccgaacacggcggacaaagcaactgggattcatggttcggcaatgccgcgaactctgttcccttctttgtcactgagtggggctggatacagggcggcgccaccccaactaatggcacacagtctggctacggtgttccgttcagtaactaccttgaatcaaagggcttgagttggaccgcctgggtctttgatcaatattgggatcctaaaatgtgggatgagaactggaacctgctcggcggtgaaaatttcatgggacaattcacaaaggatttgctcttcgcacaccgcaatgacagtttgcccagtagtaccaacacaccgggtggacccactgccacgcgtacaaatacatcgcctccaccaacagcgacgaatacatcagcgagtggtggagcgctgaaagtccaattggtaacgggcggcaccgagaatagccaacaatctgctttccattataagattttgaacacgggcgccagtgctcaatctaatatttctgtgcgcatttactttacgttggatggttcgcaagcagcctccaaatatgttctcgagaaatattatgaccaatctggagtagcgacgatttccggaccaacccaggtatcaggctcttcttattactttacagtgagctatggtacgactgctcttgccgcaggtgccggttgggaatatcacaccgcactccgcctgagtgattggagcgcaaatttctcaagcgcgaacgattggtggcgtgcaactggctctatgccagccagttacacggactggcccacgatccctgcttatgtgaacggctcgctagtgtggggtagtgcaccaggtggtggaccaaccgctaccaatacgcctgttacaccaactgccacattcacacgtacgaacacacccagtggtccgacttttactcctacacggaccaacacaccgatcacaccgacggccacattcacacgtacgaacacgcccagcgggccaaccttcactttcacacccactgcgactgctacccgtacgaatacccccagtggtccaaccacgcttaaggttcaatataaagctgcggatacaaacgctggtgataaccagatcaagccgcacttcaacattgtcaacacaggtgcaagcgcggtacctctgggtgaattgaagatccgttattggtacacgcgtgaaggaacagtggggcagactttcttctgcgattactctgccattacaggtgggtgtggcaacctcagtggagcgtttgtgcaagtcagcccggctcgaacaggggcagatttctacctggaaatcagcttcaatactgcggcaggatccatcgcggcaggcggtcagagcggagaaattcaagctcgctttgctaagaccgattggtcgaattacaacgagaccggcgattattcctttgaccccaccaagactgccttcgccgattggacaaatgtgactctctatcgcaacggagcgctcgtctggggcactgaacctggtggtggcggacccaccaacacaccaaccgctacgaatacacccggtggaccaactaatacgccaacccgtaccaacactccgatcactccaacctttacaccgactcgaacaaatactccaggcggtccgaccaatacaccaactcgtacaccgactgcaacattgacgccacctcctggaacgcatttggataatccctttgtgggtgcgacgttctatagaaatgtggattacgttgcttcagtcaacgccgcagcggattcacagaccgggacgctcgccgcgcagatgaggttggttgccaattacccgacctttgtctggctggatagcattgacgcggtcaacggcacgaacggttatcccagaagtttggctggtcatttgaatgcagctattactcagggtgccaacgccattggcattgtcgtctatgacctgcccaaccgcgactgctcagccttagcctctaacggcgaattgctcatcgcacaaaacggactcaatcgctacaagaccgaatacattgatgcgatctacaacacgattagccaaccacaatatagtaatttgcgcatcatcatggtcatcgagccagattctctgccgaacctagtcaccaacttgagcttcgccaaatgctctgaagctcaatcaacgggtgcttatgtacagggcgttcaatatgcccttggcacattgcgctcactcaataacacttacgcctatattgatgtggcgcatgcggcgtggctcggctggccttccaactttactccatttgtgaacttgctcaagacagttggcacaggtattcccggcggcaacagcaaagtggatggtttcatcagcaacacagccaactacaacccagtggatgaaccattcatggatgcgaacacgatggttggtggcaatcccgttcgctcactgcaaggttggtacgactggaatgattacattgatgaacaaccctacatccttgctctgcggactgcgctcacgacgggaaccgacgcgtacccaaccagtgtgggcgtgatcattgatacttcgcgcaatggctggggtggtacgaaccgtccgactgctgcaagtacatcaacagtactaagcacctttgtgatggaaagccgaatcgataaacgcatccacaaaggcaattctttggatccactagtgtcgacctgcaggcgcgcgagctccagcttttgttccctttag

SEQ ID NO: 2 - protein, 1149 aa, Unknown
  Obtained from environmental sample
  SITE (75)...(78): N-glycosylation site. Prosite id = PS00001
  SITE (148)...(151): N-glycosylation site. Prosite id = PS00001
  SITE (173)...(182): Glycosyl hydrolases family 5 signature. Prosite id = PS00659
  SITE (186)...(189): N-glycosylation site. Prosite id = PS00001
  SITE (221)...(224): N-glycosylation site. Prosite id = PS00001
  SITE (281)...(284): N-glycosylation site. Prosite id = PS00001
  SITE (343)...(346): N-glycosylation site. Prosite id = PS00001
  SITE (371)...(374): N-glycosylation site. Prosite id = PS00001
  SITE (411)...(414): N-glycosylation site. Prosite id = PS00001
  SITE (486)...(489): N-glycosylation site. Prosite id = PS00001
  SITE (515)...(518): N-glycosylation site. Prosite id = PS00001
  SITE (665)...(668): N-glycosylation site. Prosite id = PS00001
  SITE (717)...(720): N-glycosylation site. Prosite id = PS00001
  SITE (737)...(740): N-glycosylation site. Prosite id = PS00001
  SITE (871)...(874): N-glycosylation site. Prosite id = PS00001
  SITE (898)...(914): Glycosyl hydrolases family 6 signature 1. Prosite id = PS00655
  SITE (964)...(967): N-glycosylation site. Prosite id = PS00001
  SITE (995)...(998): N-glycosylation site. Prosite id = PS00001
MSRNIRKSSFIFSLLTIIVLIASMFLQTQTAQAISTPWLSTSGRFIRDPQGNNVVLRGVSLVDIGEVNLGRTRNVSQLINMATNEADGWYARVVRLPVYPNAIDSSPGWLANPDAYFNNHLNPAIQNCVARQIYCIIDWHYIADYNNSTIDTNTRAFWNYVAPRYANTPNVIFELYNEPVNPDNWSTWKQWAQPWVDIIRSHAPNNLILIGGPRWSQNLSSAASSPFTGSNLVYVAHIYPEHGGQSNWDSWFGNAANSVPFFVTEWGWIQGGATPTNGTQSGYGVPFSNYLESKGLSWTAWVFDQYWDPKMWDENWNLLGGENFMGQFTKDLLFAHRNDSLPSSTNTPGGPTATRTNTSPPPTATNTSASGGALKVQLVTGGTENSQQSAFHYKILNTGASAQSNISVRIYFTLDGSQAASKYVLEKYYDQSGVATISGPTQVSGSSYYFTVSYGTTALAAGAGWEYHTALRLSDWSANFSSANDWWRATGSMPASYTDWPTIPAYVNGSLVWGSAPGGGPTATNTPVTPTATFTRTNTPSGPTFTPTRTNTPITPTATFTRTNTPSGPTFTFTPTATATRTNTPSGPTTLKVQYKAADTNAGDNQIKPHFNIVNTGASAVPLGELKIRYWYTREGTVGQTFFCDYSAITGGCGNLSGAFVQVSPARTGADFYLEISFNTAAGSIAAGGQSGEIQARFAKTDWSNYNETGDYSFDPTKTAFADWTNVTLYRNGALVWGTEPGGGGPTNTPTATNTPGGPTNTPTRTNTPITPTFTPTRTNTPGGPTNTPTRTPTATLTPPPGTHLDNPFVGATFYRNVDYVASVNAAADSQTGTLAAQMRLVANYPTFVWLDSIDAVNGTNGYPRSLAGHLNAAITQGANAIGIVVYDLPNRDCSALASNGELLIAQNGLNRYKTEYIDAIYNTISQPQYSNLRIIMVIEPDSLPNLVTNLSFAKCSEAQSTGAYVQGVQYALGTLRSLNNTYAYIDVAHAAWLGWPSNFTPFVNLLKTVGTGIPGGNSKVDGFISNTANYNPVDEPFMDANTMVGGNPVRSLQGWYDWNDYIDEQPYILALRTALTTGTDAYPTSVGVIIDTSRNGWGGTNRPTAASTSTVLSTFVMESRIDKRIHKGNSLDPLVSTCRRASSSFCSL

SEQ ID NO: 3 - DNA, 1356 bp, Unknown
  Obtained from environmental sample
atgcgcttgaagaccctcgccaccgccacggcggccgccgccgtggtcgccggcaccgccgtgctctggcccggctccgcctccgccgccgagtcacccttctatgtcgatccgcagaccggcgccgcccgctgggtcgccgccaacccgggcgactccaaggccgcggtgatccgcgaccggatcgccagcgtcccgcagggccgctggtacacccagaacaacaccgccacggtcgccgccgaggtggactccttcgtgggcgccgccgccgcggccggcaagacgccgatcatggtcgtctacaacatccccaaccgcgactgcagcggcgccagctccggtggcctggccaaccacaccgtctaccggcagtggatcgaccaggtggccgccgggctcaagggccgcgcggccgcgatcatcctggaaccggacgtgttgccgatcatgtcgagctgcatgtcgtccgcgcagcaggaagaggtctacgcctcgatggcgtacgcgggcaagaagctcaaggccgcctcgtccgcggccaaggtctacttcgacgccgggcactcggcctggctgtccccgggggacatggccgcccggctggtccgcgccgacatcgccaacagcgccgacggcatctcggtcaacgtctccaactaccgcaccaccgccgagtcgaccacctatgtccgcaacgtgctggccgcggtcggcgtctcccggctgcgcggcgtgatcgacaccagccgcaacggcaacggcccggccggcagcgagtggtgtgacccgggcggacgggcgatcggcattcccagcacgaacgcggtgtccgatgcgatcctggacgcgtacctgtggatcaagctgcccggcgaagccgacggctgcatcgccggggccggtcagttcgtcccgcagcgcgcctacgacctggccgtcgcggccgggccgtacacaccgccgccggcgaccaccccaccgaccaccaccccgccggccaccaccccgccggtcacgccgccggtgaccaccccgccgccggccggtggctgctcggtgtcctacacggcgaactcctggtcgaacggcttcaccgccgatgtccggatcaccaaccgcggcgccgcgctgagctcctggacgctgaccttcaccgtgcccgccaacgtcaccctgagcagcggctggagcggcacctggagccagtccggcagcacgatcacggtccggaacgcggcctggaacggcgcgctcggcagcggcgccaccaccagcaccggcttccaggcgaccttcaccggtgcggccccggccagcccgaccggcttcgcgctgaacggcacgccgtgctga

SEQ ID NO: 4 - protein, 451 aa, Unknown
  Obtained from environmental sample
  SITE (75)...(78): N-glycosylation site. Prosite id = PS00001
  SITE (101)...(117): Glycosyl hydrolases family 6 signature 1. Prosite id = PS00655
  SITE (120)...(123): N-glycosylation site. Prosite id = PS00001
  SITE (220)...(223): N-glycosylation site. Prosite id = PS00001
MRLKTLATATAAAAVVAGTAVLWPGSASAAESPFYVDPQTGAARWVAANPGDSKAAVIRDRIASVPQGRWYTQNNTATVAAEVDSFVGAAAAAGKTPIMVVYNIPNRDCSGASSGGLANHTVYRQWIDQVAAGLKGRAAAIILEPDVLPIMSSCMSSAQQEEVYASMAYAGKKLKAASSAAKVYFDAGHSAWLSPGDMAARLVRADIANSADGISVNVSNYRTTAESTTYVRNVLAAVGVSRLRGVIDTSRNGNGPAGSEWCDPGGRAIGIPSTNAVSDAILDAYLWIKLPGEADGCIAGAGQFVPQRAYDLAVAAGPYTPPPATTPPTTTPPATTPPVTPPVTTPPPAGGCSVSYTANSWSNGFTADVRITNRGAALSSWTLTFTVPANVTLSSGWSGTWSQSGSTITVRNAAWNGALGSGATTSTGFQATFTGAAPASPTGFALNGTPC

SEQ ID NO: 5 - DNA, 1425 bp, Unknown
  Obtained from environmental sample
gtgtcaggagaaccgcacgtgtcccttcgtctctcgcgcccccgccgtcgtacagccatcctcgccgcggtcgccgcgtgcacggtcaccgcgggtgcctggctcgcaaccggcaccgcctcggccggcacgctgtccggcaccctctaccgcgatcccaactcgtcagcgacacgctgggtggcggccaacccgaacgactctcgtgcatcagccatccgcgacaagatagccagccagccggcggcccgatggctggccaatttcaacatctccaccatccagtccgaggtttcgacctacatcggtgcggccaacagcgccaatcaggtcccggtcttcgccgtgtacatgatccccaaccgcgactgcggtggggccagcgccggtggcgcgcccgacctgaaccagtaccagacctgggtctcggcgttcgcccagggactcggcaacaggctggtcatcatcatcctcgagaccgactcgttggcgctcaccacctgcctggacgcgaacgccctggccgcccgtaaccaggccatcagcaccgcggtgcagaccatcaagtcgcgcaacgcgaacgccaaggtgtacctcgacggcggacactccacctggaacagcgcgtcggacacggccaaccgccttcggaatgccggagtccagttcgctgacggcttcttcaccaacgtctcgaacttcaactcgaccagtagcgaggtgaacttcggccggtcggtcatttcggccctgtcctcgctcggcatcagtggcaagcgccagatcatcgacaccagccgtaacggcggcgccagtggtgactggtgcgcagacgacaacactgaccgccggctcggacaatggccgacactgaacaccggtgatggcaatgtggacggctacctctgggtcaagccgcccggcgaggccgacggttgcgccttccaggccggcagcttccagccgcagctcgcgttcagcctcactcagggaataggcaacccgccgacctcggccccgccgaccaccgccgtgcctaccaccacgcggccgccgacctcggcgccgccgaccaccacgcggccgccgacctcggccccgccgaccaccacaccaccgcccactacgacgggcgcctgctccgccaccatgtcgatcaccaactcgtggcccggcggtttccaggcgaatgtcaccgtggcggccggcagcgcggcgatctccgggtggactgtccggtggaccctgtccagcggtcagaccatcacccaactctggaatggggcccagacggtgagcgggtcagccgtgacggtcaggaatctgtcctacaacggctcgctggcagccggtgcgaacacctcgttcgggttcaccgctaacggcagcgcttcgacgcccgcgaccacctgcacatcgccgtag

SEQ ID NO: 6 - protein, 474 aa, Unknown
  Obtained from environmental sample
  SITE (54)...(57): N-glycosylation site. Prosite id = PS00001
  SITE (67)...(70): N-glycosylation site. Prosite id = PS00001
  SITE (91)...(94): N-glycosylation site. Prosite id = PS00001
  SITE (233)...(236): N-glycosylation site. Prosite id = PS00001
  SITE (238)...(241): N-glycosylation site. Prosite id = PS00001
  SITE (403)...(406): N-glycosylation site. Prosite id = PS00001
  SITE (447)...(450): N-glycosylation site. Prosite id = PS00001
  SITE (451)...(454): N-glycosylation site. Prosite id = PS00001
  SITE (459)...(462): N-glycosylation site. Prosite id = PS00001
  SITE (468)...(471): N-glycosylation site. Prosite id = PS00001
MSGEPHVSLRLSRPRRRTAILAAVAACTVTAGAWLATGTASAGTLSGTLYRDPNSSATRWVAANPNDSRASAIRDKIASQPAARWLANFNISTIQSEVSTYIGAANSANQVPVFAVYMIPNRDCGGASAGGAPDLNQYQTWVSAFAQGLGNRLVIIILETDSLALTTCLDANALAARNQAISTAVQTIKSRNANAKVYLDGGHSTWNSASDTANRLRNAGVQFADGFFTNVSNFNSTSSEVNFGRSVISALSSLGISGKRQIIDTSRNGGASGDWCADDNTDRRLGQWPTLNTGDGNVDGYLWVKPPGEADGCAFQAGSFQPQLAFSLTQGIGNPPTSAPPTTAVPTTTRPPTSAPPTTTRPPTSAPPTTTPPPTTTGACSATMSITNSWPGGFQANVTVAAGSAAISGWTVRWTLSSGQTITQLWNGAQTVSGSAVTVRNLSYNGSLAAGANTSFGFTANGSASTPATTCTSP

SEQ ID NO: 7 - DNA, 2205 bp, Unknown
  Obtained from environmental sample
atgaagagtgttttagcattggccttaatagtttccattaatttggttttattagcaaattctgtattaattccgccaaatatcgacgattctttcttatacggtaacgaacttgtgaagaaaccttcggaagccggggctttgcgagttattgagtataacgggataaaaaccttgggagatgaagaaggtaatcctattcaattaaggggtatgagcacgcacgggcttcaatggttccccgaaattctaaacgaaaatgctttcgccgctcttgcaaatgattgggaagcgaatgtaattcgccttgccatgtatgtgggagaagacggatacgcaacagatcctgaaaccatcaaaaaaagagtcattcaaggaatcgatcttgcaaagaagtacgatatgtacgtgatcgtagattggcacgtacatgcaccaggagatccaactgatccaatatatgagggagcacaggaattctttaaagaaatttcagaattgtatcctaatgaccctcatatcatctatgaattatgtaacgaaccaaatggtatcccaaatgatgaaaccggttggcaaattgtaaaagattatgcagaacctattattgaaatgcttcgggaaaacgggaatgaaaacatcgttattgttggaaatcctaattggagccaaagacctgatttagctgctgatgatccaatcgatgatcaaaataccgtttacacccttcatttttatgcaggtacccataaaccgtcaccagatagttacgtaatgaaaaatgcaatttatgcattgaagcacggtgcccctatttttgtatctgaatggggaacaagcgaagctactggcgatggtggaccatatatagaagaatcagatgaatggcttaagtttttgaacgccaataacgttagttgggttaattggtctcttactaataaaaatgaaaaatctgcggcatttacaccatacgtatatggtgaatctgaagcaacagatcttgatccaggacctgatcaaatatggtcaccagaggaactaagtatttcaggagaatatgttcgtacacgtataaaaggtgtagaatacgaaccaattgaccgttcaaattactacaaaacattatgggattttgatgatgggacaactcaaggctttgtagtaaattccgacagtcctgtcactgatgtatcgttgaccaatgaggataatagattaaaaatttctggtttagatgcaagcgatgacgttagcgaaggaggattttggaacaatcttcgtatttctgcggataattggggcaacgcagttgatattaccggggctggaaaaataatgatagatgttattttaaaatctcctgcaactgttgctatagcagtgattcctcaaggacccgggaatggctggtggactaatcctgctcgcgctgtaaggctcaccccaaatgattttgtcaaacaagttgatggaacttacaaagcagttctaacaattacggctgaagatagcccgggcttggaaacaattggcacgagtgacacagacaatacgattcaaaatatcgtccttttcgtaggtacagagggagcagatgtaatttatttggataattttaaggtttctggcaaaaaaattgaaattcccattatccatgatccgttaggtgaagcaaaattaccgtcggattttgaagatggtactcgccagggttggaaatggagtagtgactcagcagtgcaaacagctcttaccattgaagaagccaacggttcaaaagctttatcttgggaagtagcttatcctgaagtaaagccaagtgatacgtgggcatccgcaccacgtttagatttctggatggatggtctaaaacgcggggataaaaatttcttgttttttgatttttatttagctcccgatagagcttccgaaggaattattgaaataaatttggcgtttcaaccatcatcagcaggttattgggcacaggcaaccgatacttatgaaattgatttatcagatcttgattcaacaactgtaacaaatgatggcctgtaccattatgaagtaaaaatagatttaaattcagttcccaatattgaagacaacactgatttaagaaatatgcttttaatttttgttgatgtaaacagcgacttcgctggaagaatgtatatagataatgtcaattttattgaataa

SEQ ID NO: 8 - protein, 734 aa, Unknown
  Obtained from environmental sample
  SITE (176)...(185): Glycosyl hydrolases family 5 signature. Prosite id = PS00659
  SITE (224)...(227): N-glycosylation site. Prosite id = PS00001
  SITE (308)...(311): N-glycosylation site. Prosite id = PS00001
  SITE (313)...(316): N-glycosylation site. Prosite id = PS00001
  SITE (395)...(398): N-glycosylation site. Prosite id = PS00001
  SITE (600)...(603): N-glycosylation site. Prosite id = PS00001
MKSVLALALIVSINLVLLANSVLIPPNIDDSFLYGNELVKKPSEAGALRVIEYNGIKTLGDEEGNPIQLRGMSTHGLQWFPEILNENAFAALANDWEANVIRLAMYVGEDGYATDPETIKKRVIQGIDLAKKYDMYVIVDWHVHAPGDPTDPIYEGAQEFFKEISELYPNDPHIIYELCNEPNGIPNDETGWQIVKDYAEPIIEMLRENGNENIVIVGNPNWSQRPDLAADDPIDDQNTVYTLHFYAGTHKPSPDSYVMKNAIYALKHGAPIFVSEWGTSEATGDGGPYIEESDEWLKFLNANNVSWVNWSLTNKNEKSAAFTPYVYGESEATDLDPGPDQIWSPEELSISGEYVRTRIKGVEYEPIDRSNYYKTLWDFDDGTTQGFVVNSDSPVTDVSLTNEDNRLKISGLDASDDVSEGGFWNNLRISADNWGNAVDITGAGKIMIDVILKSPATVAIAVIPQGPGNGWWTNPARAVRLTPNDFVKQVDGTYKAVLTITAEDSPGLETIGTSDTDNTIQNIVLFVGTEGADVIYLDNFKVSGKKIEIPIIHDPLGEAKLPSDFEDGTRQGWKWSSDSAVQTALTIEEANGSKALSWEVAYPEVKPSDTWASAPRLDFWMDGLKRGDKNFLFFDFYLAPDRASEGIIEINLAFQPSSAGYWAQATDTYEIDLSDLDSTTVTNDGLYHYEVKIDLNSVPNIEDNTDLRNMLLIFVDVNSDFAGRMYIDNVNFIE

SEQ ID NO: 9 - DNA, 2268 bp, Unknown
  Obtained from environmental sample
atgagagaaattattttaaagtctggtgcactcttgatggtagttattttgattgtttctattttgcaaattttaactgtgtttgcccagagcacaccatatgaaaatgaaaaatatccacaccttcttggcaaccaagcggtgaaaaaaccatcagttgctggcaggctccagattattgaaaaggacggtaaaaagtatttagctgaccagaaaggcgaaataattcagcttcgtggcatgagcacgcatggactccagtggtatggtgacattgtaaacagaaatgcgtttgctgctctttcaaaagattggggatgcaatgttataaggcttgcgatgtatgtgggtgaaggtggttatgcttcaaatccaggcattaaagaaaaagttgtaaagggaataaaacttgcaattgaaaatgacatgtatgtgattgttgactggcatgtgttaaatcccggcgacccgaatgctgaaatttataaaggggcaaaagactttttcaaagagatagctacaagttttcccaatgactatcacataatatatgaactttgtaatgaaccgaatccaaatgagccgggagtagaaaatagcttggatggttggaaaaaggtaaaggcttatgcgcagtccatcataaaaatgctcagaagtttggggaatcagaacattataattgtaggttcgcccaattggagccagagacctgactttgcaattcaagaccctataaacgacaaaaatgttatgtattcagttcatttttattctggtactcacaaggttgatgggtatgtttttgaaaacatgaaaaaggcatttgaaaatggtgtgccaatttttgtgagtgaatggggaacaagtttggcaagcggtgatggtggaccatatcttgatgaggcggataagtggcttgagtatttaaatgcaaactatattagctgggtgaactggtcactgtcaaacaaaaatgaaacatcagctgcttttgtcccgtatgttagtggcatgcatgatgccacatcacttgatcctggcgatgataagatgtgggatataaaagagctgagtatatctggagagtatgtgagagcaaggataaaagggattgcatatgaaccaattgagagggatagccaaataaaagaaggacaaagtgcacctttgggtgaaaaagttttaccatccacgtttgaggatgacacgcgccagggttgggactgggatggtccgtctggtgtgaaaggacctattaccatcgaaagtgtaaatggttcaaaagcgctatcttttgaggttgagtatccagagaaaaaaccgcaagatggctgggcaacagctgcaagacttatacttaaggaaataaatgcgaagagagaagataataagtatcttgcatttgacttttatataaaaccagaaagagcgtcaaaaggtgagattgagatatttttagctttttcaccaccttccttaggttactgggctcaagtacaagacagttttaatattgacctctcaaagctttcaagtgcaaaaaagacagaagaggggctttacaaattcaatgtattttttgacttagacaaaatccaagatggcaaagtgctaaaaccagacacgatcttgagggatattataatagtcatagcagatgggaatagcgattttaaaggaaaaatgtttatagacaatgttagattcaccaacatcctttttgaagacatcagccttgagagcagcctttatgatgctgtctccaagctttattcaaaaggaatcataaaaggagcttcagcttttaagtacttgcctgacaagaacatcacaagggctgaatttgctgcactatgtgtcagggcattgaacctgaaaattgaaaagtatgacggcaggttttctgatgtaaaaagtgacacctggtattcggatgtggtttatacggcgtataaaaacggtttgtttggacaggagaaaaatagattcttccctgaaaggattatgaaaagagaagaaacagcagctttggcaattgaagtgtacaaaagattgacaggtaaaatagaagttagcacagacgatattcaaattgccgatgaagggcttataaatcctcaatacaaagaaagcgtgaagttagctattcagctcggtattattgacctgtattcagacggaacctttgcaccaagtaagagcgtttcgagaggggaggcagcaacaattttctataacatcttgaacttagcaggcaagctatga

SEQ ID NO: 10 - protein, 755 aa, Unknown
  Obtained from environmental sample
  SITE (1)...(4): Tubulin-beta mRNA autoregulation signal. Prosite id = PS00228
  SITE (184)...(193): Glycosyl hydrolases family 5 signature. Prosite id = PS00659
  SITE (236)...(239): N-glycosylation site. Prosite id = PS00001
  SITE (323)...(326): N-glycosylation site. Prosite id = PS00001
  SITE (331)...(334): N-glycosylation site. Prosite id = PS00001
  SITE (432)...(435): N-glycosylation site. Prosite id = PS00001
  SITE (619)...(622): N-glycosylation site. Prosite id = PS00001
MREIILKSGALLMVVILIVSILQILTVFAQSTPYENEKYPHLLGNQAVKKPSVAGRLQIIEKDGKKYLADQKGEIIQLRGMSTHGLQWYGDIVNRNAFAALSKDWGCNVIRLAMYVGEGGYASNPGIKEKVVKGIKLAIENDMYVIVDWHVLNPGDPNAEIYKGAKDFFKEIATSFPNDYHIIYELCNEPNPNEPGVENSLDGWKKVKAYAQSIIKMLRSLGNQNIIIVGSPNWSQRPDFAIQDPINDKNVMYSVHFYSGTHKVDGYVFENMKKAFENGVPIFVSEWGTSLASGDGGPYLDEADKWLEYLNANYISWVNWSLSNKNETSAAFVPYVSGMHDATSLDPGDDKMWDIKELSISGEYVRARIKGIAYEPIERDSQIKEGQSAPLGEKVLPSTFEDDTRQGWDWDGPSGVKGPITIESVNGSKALSFEVEYPEKKPQDGWATAARLILKEINAKREDNKYLAFDFYIKPERASKGEIEIFLAFSPPSLGYWAQVQDSFNIDLSKLSSAKKTEEGLYKFNVFFDLDKIQDGKVLKPDTILRDIIIVIADGNSDFKGKMFIDNVRFTNILFEDISLESSLYDAVSKLYSKGIIKGASAFKYLPDKNITRAEFAALCVRALNLKIEKYDGRFSDVKSDTWYSDVVYTAYKNGLFGQEKNRFFPERIMKREETAALAIEVYKRLTGKIEVSTDDIQIADEGLINPQYKESVKLAIQLGIIDLYSDGTFAPSKSVSRGEAATIFYNILNLAGKL

SEQ ID NO: 11 - DNA, 3033 bp, Teredinibacter
atgggaacatctcttatgatcaaatctacactgacaggtatgattactgctgttgccgccgcagttttcaccacctctgcagctttcgcggatgtacctccgttgacagtgagcggaaatcaggttttaagtggcggtgaagcaaaaagcttcgctggtaacagcttcttttggagcaataccggatggggccaggaacgtttttacaacgcagaaactgtgcgttggttgaaagacgactggaacgcaaccattgtccgcgccgctatgggcgtagactttgatggcagctatatccccgagcatgaagacgccgaccccgagggtaacgtcgctcgcgtacgtgcattggtggatgcagccatcgcagaagacatgtacgtgattatcgattttcacactcaccacgcagaagattaccaagccgaatctatcgagttcttcgaagaaatggccacactgtacggtgggtacgacaatgttatttatgaaatctataacgagcccctgcaaatcagctgggacaatgttattaaaccttatgcagaatcggtgattggcgctatccgcgcaatcgacccggacaacctgattatcgtcggcacgcccacttggtcacaggacgtggacgccgctgcgcgcaatccaatcaccagctacagcaatattgcgtacaccctgcacttttacgcaggcactcacggttcatggttgcgcgataaagcgcgtaacgctatgaacagtggtattgcgctgtttgtgactgagtggggcaccgttaatgcagatggcgatggtgcgcctgcagttaacgaaactcagcaatggatggacttcctcaagcagaacaatatctctcacttgaactggtccgtgagtgataaattggaaggtgcgtctatcgtacaacctggcacgcccattagcggctggaacgcttctgaccttacggcctccggcacactggttaagaacatcgtttccaactggggcaccacaatcggtaacggcagctcctcaagttcatccagctcctcttccagctcttcaagcagttcttcttcgagcagttcctcctccagcagctcttcctcgtcaagcagctccggatcaactggtggcggcaactgtgctggagtgaatgtgtacccgaactggaccgcgcgtgactggtctggcggcgcctacaaccatgcgaacgctggcgaccaaatggtctatcaaaacagcctgtatcgtgccaactggtacaccaacagcgtgcctggcagcgacgcctcctggactagccttggcgcctgcggaggcaacggaagtacgacctcatccagctcaagcagctcctcgtcaagcagcagctcttcttccagcagctcctcgtctactggcggtggctccagctcctccagcagttcatcttcttcatcgtcgtcttccagcagctctagcagcactggtggcggtcaatgtaccgaagtgtgcaactggtacggtcagggaacctacccactgtgtaacaacaccagtggttggggttgggaaaacaatcagagctgtatcggccgtcaaacctgtgagtcacagaacggtggcgctggcggcgtggtgagcaactgcaccggttcgagtacatccagcagctcctcttccagcagtagttcttcctcaagtagcagctccagttcatccagcagctcttcatctggcactggtagcagtacatcttccagcagcagctcttccagcagctccagctcaagtaccggttcctccggtatgcctggaccacgcgtggacaaccccttcgccgctgcgcagaagtggtacataaacccaatgtggtcagcgagtgctgcaaacgaacccggcggctctgtcattgccaacgaaccctcgtttgtatggatggaccgtatcggcgcaatcgaagggcctgctgacggtatgggcctgcgcgaccacttgaacgaagcccttgcacaaggcgccgacctgttcatgtttgttgtgtacgacctgccaaaccgtgactgtgctgcactcgcctccaacggtgaactgcgcatctccgaagatggcttcaacatctacaagtccgactacatcgcacctatcgttgaaatcatcagcgaccctgcatacgcaggtatcaaaatcgctgcggttatcgaggtggactcactgcctaacctggttaccaatctgagcgaacctgactgtcaggaagcaaatggtcctggcggctaccgcgacggcattcgtcacgctatcactgaactgggcaaaatccccaacgtatactcctacgtggatattgcacactcaggctggctgggctggaacgacaacttcgcgcaaggcgttaacctgatttatgaagtggttgccaacctcggttccggcattaacccaatcgccggtttcgtcagtaactccgctaactacacgcctgtggaagaacccttcttgccagacgccaacctgcaggtcggtggtcagcccgttcgctcttccgatttctatgagtggaacagctacctggcagagaaacccttcgtgaccgattggcgttctgccatgatctcgaaaggtatgccaagctccatcggtatgctgatcgataccgcacgtaacggctggggtggccctgagcgtccaactgcgcagtctacctccaacaacctgaacaccttcgttaacgaatcacgtatcgaccgtcgtgagcaccgcggcaactggtgtaaccagcctggtggtgtcggctaccgtccaaccgctgcaccttctccaggtattgatgcctacgtttgggtgaaaccacagggtgagtctgacggtgtttccgatcctaacttcgagatcgatcctaacgacccgaacaaacagcacgacccaatgtgtgatccgttcgccagcaactcgtccaacagtgcatacggcaccggcgctatgccaaatgctccgcacgctggtcgctggttccctgaagccttccagttactgcttgaaaacgcttacccaccaattaactag

SEQ ID NO: 12 - protein, 1010 aa, Teredinibacter
  SITE (83)...(86): N-glycosylation site. Prosite id = PS00001
  SITE (163)...(172): Glycosyl hydrolases family 5 signature. Prosite id = PS00659
  SITE (275)...(278): N-glycosylation site. Prosite id = PS00001
  SITE (288)...(291): N-glycosylation site. Prosite id = PS00001
  SITE (293)...(296): N-glycosylation site. Prosite id = PS00001
  SITE (316)...(319): N-glycosylation site. Prosite id = PS00001
  SITE (341)...(344): N-glycosylation site. Prosite id = PS00001
  SITE (390)...(393): N-glycosylation site. Prosite id = PS00001
  SITE (443)...(446): N-glycosylation site. Prosite id = PS00001
  SITE (513)...(516): N-glycosylation site. Prosite id = PS00001
  SITE (523)...(526): N-glycosylation site. Prosite id = PS00001
  SITE (546)...(549): N-glycosylation site. Prosite id = PS00001
  SITE (679)...(695): Glycosyl hydrolases family 6 signature 1. Prosite id = PS00655
  SITE (745)...(748): N-glycosylation site. Prosite id = PS00001
  SITE (913)...(916): N-glycosylation site. Prosite id = PS00001
  SITE (987)...(990): N-glycosylation site. Prosite id = PS00001
MGTSLMIKSTLTGMITAVAAAVFTTSAAFADVPPLTVSGNQVLSGGEAKSFAGNSFFWSNTGWGQERFYNAETVRWLKDDWNATIVRAAMGVDFDGSYIPEHEDADPEGNVARVRALVDAAIAEDMYVIIDFHTHHAEDYQAESIEFFEEMATLYGGYDNVIYEIYNEPLQISWDNVIKPYAESVIGAIRAIDPDNLIIVGTPTWSQDVDAAARNPITSYSNIAYTLHFYAGTHGSWLRDKARNAMNSGIALFVTEWGTVNADGDGAPAVNETQQWMDFLKQNNISHLNWSVSDKLEGASIVQPGTPISGWNASDLTASGTLVKNIVSNWGTTIGNGSSSSSSSSSSSSSSSSSSSSSSSSSSSSSSSSGSTGGGNCAGVNVYPNWTARDWSGGAYNHANAGDQMVYQNSLYRANWYTNSVPGSDASWTSLGACGGNGSTTSSSSSSSSSSSSSSSSSSSSTGGGSSSSSSSSSSSSSSSSSSSTGGGQCTEVCNWYGQGTYPLCNNTSGWGWENNQSCIGRQTCESQNGGAGGVVSNCTGSSTSSSSSSSSSSSSSSSSSSSSSSSSGTGSSTSSSSSSSSSSSSSTGSSGMPGPRVDNPFAAAQKWYINPMWSASAANEPGGSVIANEPSFVWMDRIGAIEGPADGMGLRDHLNEALAQGADLFMFVVYDLPNRDCAALASNGELRISEDGFNIYKSDYIAPIVEIISDPAYAGIKIAAVIEVDSLPNLVTNLSEPDCQEANGPGGYRDGIRHAITELGKIPNVYSYVDIAHSGWLGWNDNFAQGVNLIYEVVANLGSGINPIAGFVSNSANYTPVEEPFLPDANLQVGGQPVRSSDFYEWNSYLAEKPFVTDWRSAMISKGMPSSIGMLIDTARNGWGGPERPTAQSTSNNLNTFVNESRIDRREHRGNWCNQPGGVGYRPTAAPSPGIDAYVWVKPQGESDGVSDPNFEIDPNDPNKQHDPMCDPFASNSSNSAYGTGAMPNAPHAGRWFPEAFQLLLENAYPPIN

SEQ ID NO: 13 - DNA, 966 bp, Unknown
  Obtained from environmental sample
atgatgcgcacgctcgtcacgtcggcattcgcgtgcctgctcctgcccctcggcaccgggcaggccgatgccggcgtcctggccgatccgatcggcatgaccagcgggttctacacggacccgaactcgaatccggccgcatgggtcgcggcgaaccccggcgacggacgggcgccggcgatccgggacaacatcgcctcgcgccccatggcccggtggttcggttcctggagcggtgacatcggggccgcggtgggctcctacgtgggagccgcggacgccgccgacaagcttcccgtcctgatcgcctacaacatccccggccgggacgcctgtggcggccactccggcggcggggcgggttctccggcggcgtaccgcacctggatctccgccttcgcctcggccatcggcgggcgaccggcgctggtggtgatcgagcccgactccctcggtgattacagctgtctgacccagcagcagatcgatgagcgcaacgccatgctcaaagacgccctggcgcagttctccgcgcacgcgcccaacacgtggacgtacctggatgcgggaaaccccgcctggatcgacgcggccaccatggcccggcatctcgacggcgccggggcccggcaggcgcacggcttctcgtcgaacatctcgaactactacggcaacagccggaacatcagttacggcaacgccatcaactcggcgctgtcggcctcctacggttacacgaagcctttcgtcatcgacaccagccgcaacggcaacgattccaacggcgagtggtgcaaccccgcagggcggaggatcggggccgtcagccagacgggcggtggagccgagatgctgctgtggctgaagacccccggcgagtccgacggcaactgcggagtcggcgccggctccgtggccggtcagttcctcccggaagtcgcgtacaagatgatctacggatactga

SEQ ID NO: 14 - protein, 321 aa, Unknown
  Obtained from environmental sample
  SITE (145)...(154): Glycosyl hydrolases family 6 signature 2. Prosite id = PS00656
  SITE (221)...(224): N-glycosylation site. Prosite id = PS00001
  SITE (231)...(234): N-glycosylation site. Prosite id = PS00001
  SITE (261)...(264): N-glycosylation site. Prosite id = PS00001
MMRTLVTSAFACLLLPLGTGQADAGVLADPIGMTSGFYTDPNSNPAAWVAANPGDGRAPAIRDNIASRPMARWFGSWSGDIGAAVGSYVGAADAADKLPVLIAYNIPGRDACGGHSGGGAGSPAAYRTWISAFASAIGGRPALVVIEPDSLGDYSCLTQQQIDERNAMLKDALAQFSAHAPNTWTYLDAGNPAWIDAATMARHLDGAGARQAHGFSSNISNYYGNSRNISYGNAINSALSASYGYTKPFVIDTSRNGNDSNGEWCNPAGRRIGAVSQTGGGAEMLLWLKTPGESDGNCGVGAGSVAGQFLPEVAYKMIYGY

SEQ ID NO: 15 - DNA, 1212 bp, Unknown
  Bacterial DNA
gtgaaccccgagtgggccgccaaggccgccgccgaaccgggcggcaccaggatctcgaaccagcccaccggcgtctggctcgaccgcatcgccgccgtcaacggctccgccacctccatgggcctgcgtgcccacctcgacgaggccctgcgccagaagggctccggcgagctggtcgtccagctggtcatctacaacctgccgggccgcgactgcgccgccctcgccgccaacggcgagctcggcccgaccgagatcggccgctacaagaccgagtacatcgacccgatcgccgcgatcctcgccgactccaagtacgcgggcctgcggatcgtcaccacggtcgagatcgactcgctgcccaacctggtcaccaacgtctccggccgcccgaccgccacggccaactgcgacgtcatgaaggccaacggcaactacatcaccggcgtcggctacgcgctgaagaagctcggcgcgatcggcaacgtctacaactacgtggacgccggccaccacggctggctgggctgggacgacaacttcggcgcctccgccgagctgttcaagcaggccgccacggccgagggctccacgctctccaacgtccacggcttcatcgtcaacaccgccaactacagcgccctgaaggaggaccacttcaccatcaacgacagcgtcaacggcgtctccgtgcgccagtcgaagtgggtcgactggaaccggtacaccgacgagctgtcctacgcccaggcgatgcgggccaagctcgtctcgctgggcttcgacagcaacctcggcatgctgatcgacacctcccgcaacggctggggcggcgcggcccggcccaccgccgcgggcccgacgaccaccgtcgacacctacgtcaacggcggtaagtacgaccggcgcatccacctcggcaactggtgcaaccagtccggcgcgggcctcggtgagcggccccaggcggcgcccgccgcgggcatcgacgcgtacgtctggatgaagcccccgggcgagtccgacggcgccagcaaggagatcccgaacaacgagggcaagggcttcgaccggatgtgcgacccgacctacacgggcaacgcccgtaacgggaacagcatgtcgggcgcgctgccggactcgccgctcgcgggccagtggttctcggcccagttccaggagctcatgaagaacgcccacccggcgctgtag

SEQ ID NO: 16 - protein, 403 aa, Unknown
  Bacterial protein
  DOMAIN (1)...(358): Glycosyl hydrolases family 6
  SITE (34)...(37): N-glycosylation site. Prosite id = PS00001
  SITE (127)...(130): N-glycosylation site. Prosite id = PS00001
  SITE (214)...(217): N-glycosylation site. Prosite id = PS00001
  SITE (226)...(229): N-glycosylation site. Prosite id = PS00001
  SITE (315)...(318): N-glycosylation site. Prosite id = PS00001
MNPEWAAKAAAEPGGTRISNQPTGVWLDRIAAVNGSATSMGLRAHLDEALRQKGSGELVVQLVIYNLPGRDCAALAANGELGPTEIGRYKTEYIDPIAAILADSKYAGLRIVTTVEIDSLPNLVTNVSGRPTATANCDVMKANGNYITGVGYALKKLGAIGNVYNYVDAGHHGWLGWDDNFGASAELFKQAATAEGSTLSNVHGFIVNTANYSALKEDHFTINDSVNGVSVRQSKWVDWNRYTDELSYAQAMRAKLVSLGFDSNLGMLIDTSRNGWGGAARPTAAGPTTTVDTYVNGGKYDRRIHLGNWCNQSGAGLGERPQAAPAAGIDAYVWMKPPGESDGASKEIPNNEGKGFDRMCDPTYTGNARNGNSMSGALPDSPLAGQWFSAQFQELMKNAHPAL

SEQ ID NO: 17 - DNA, 2913 bp, Unknown
  Bacterial DNA
atgccacgcctccgagcacgaacgcgaccacgccggcagctgaccgcgctggccgcggcgctctccctcccgctgggcctcacggccgtcggcgccaccacggcccaggccgccgacgtgcagtgcagcgtcgactacaagacgaacgactggggttcgggcttcaccgccgagctcaccctcaccaaccgggccgccgccgccctgaacggctggaccctcacctacgcctacgccggcgaccagaagctcaccaacggctggagcggcgtctggtcgcagtccggcaagaacgtcaccgtgaccaacgcgtcctggaacggcaccctcgcccccggggccgccgtcaccaccggtgcccagttcacctacagcggcgccaacgcggcgcccagctccttcgcggtcaacggcaccccctgcacgggcgcccaccagccgcccgtcgccgtcctcaccagcccggcaccgggagccgtcttcaccgcgggcgccgcggtgccgctcgccgccacggcggccgcggccgacagcgccaccgtgagcaaggtggagttctacagcgacaccacgctcctcggcaccgacaccaccgcgcccttcaccttcagcgccaccggcctcgccaccggcgcccactccctctacgccaaggcctacgacagcctcggcgcctccgccgagtccgcgcccgtcggcatcaccgtcgccgcgggacccgcgctcgtcgccgctccgagccagctcggagtacgccagggcgcctccggcaccttcgacctgaagctctccaccgcccccaccacgaacgtcacggtgagcgtcgcccgtacctcgggcaacaccaacctcaccgcgagcccggccacgctcaccttcaccccggcgaactggaacaccgcccagaaggtgaccgtcaccgccgcggccaccggcaccggctcggccgtcttcacggcgaccgcccccggccacgccaaggccgaggtcaccgtcgcccagctggccgcggactccacgtacgacgcccgcttcctcgacctgcacgggaagatcaccaacccggccaacggctacttctcgcccgagggcatcccgtaccactccgtcgagacgctgatcgtcgaggcccccgaccacgggcacgagacgacctcggaggcgtacagctatctgatctggctccaggccatgtacggcaagatcaccggtgactggaccaagttcaacggcgcctgggacaccatggagaaattcatgatccccacccacgccgacacgccgaccaccggcagctacaacgcctcgaagccggcgacctacgcgcccgagtgggacctgccctcgcagtacccgtcgcgcctcgacggcggcgtcaccgccggcgtcgacccgatcgcgggcgagctgaagagcgcctacggcaccgacgacatctacggcatgcactggatccaggacgtcgacaacgtctacggcttcggcaacgagcccggcaagtgctccgccggaccgacggccaccggcccctcgtacatcaacaccttccagcgcggcccgcaggagtccgtctgggagaccgtcacccacccgacctgcgacaagttcgcctacggtggcaagaacggctacctcgacctcttcaccggcgactcctcctacgccaagcagtggaagttcaccaacgcccccgacgccgacgcccgcgccgtccaggccgcctactgggccgacctctgggccaaggagcagggcaagggcacccaggtcgccacgaccgtcggcaaggccgccaagatgggcgactacctgcggtacgccatgttcgacaagtacttcaagaagatcggcaactgcgtcggcccgaccacctgcccggccggcaccggcaaggacagcgccagctacctgctctcctggtactacgcctggggcggcgcgaccgacacctcggccggctggtcgtggcgcatcggctccagccacaaccacagcggctaccagaacccgctggccgcctacgcgctcagcgagtacgccccgctcaagcccaagtcggcgacgggccaggcggactgggcgaccagcctcgaccggcagctggagttctaccgctggctccagtccgacgagggcgccatcgcgggcggcgccaccaacagctggcagggccggtacgccaccccgccggccggcacccccaccttccacggcatgtactacgacgagaagcccgtctaccacgacccggcgtccaaccagtggttcggcttccaggcctggtccatggagcgcgtcgccgagtactaccagcagaccggtgacgcggcggcgaagaccgtcctcgacaagtgggtcacctgggcgctgtccaagaccacgatcaaccccgacggcacctaccgcatcccgtccaccctccagtggtccggcgcgcccgacacctggaacgcggcgaaccccggcgccaacgccgggctgcacgtcaccgtcgccgactacaccgacgacgtcggcgtggccgccgcctacgccaagacgctcacctactacgcggccaagtccggccacgccgaggccaagcgggtcgccaaggccctcctcgacggcatgtgggcccaccaccaggacccgctgggcatcgccgtcccggagacccgcgccgactacaaccggttcgacgaccccgtgtacgtgccgaacggctggaccggcaccatgccgaacggcgacccggtgaacgccacctccaccttcgcctcgatccgttccttctacaagaacgacccggcctggcccaagatcgaggcctacctggcgggcggcgccgcgcccgtcttcacgtaccaccggttctgggcccaggcggacatcgccctggccatgggctcgtacgcggagctgctcgaataa

SEQ ID NO: 18 - protein, 970 aa, Unknown
  Bacterial protein
  SIGNAL (1)...(37)
  SITE (99)...(102): N-glycosylation site. Prosite id = PS00001
  SITE (104)...(107): N-glycosylation site. Prosite id = PS00001
  SITE (108)...(111): N-glycosylation site. Prosite id = PS00001
  SITE (274)...(277): N-glycosylation site. Prosite id = PS00001
  SITE (287)...(290): N-glycosylation site. Prosite id = PS00001
  SITE (440)...(443): N-glycosylation site. Prosite id = PS00001
  SITE (673)...(676): N-glycosylation site. Prosite id = PS00001
  SITE (928)...(931): N-glycosylation site. Prosite id = PS00001
MPRLRARTRPRRQLTALAAALSLPLGLTAVGATTAQAADVQCSVDYKTNDWGSGFTAELTLTNRAAAALNGWTLTYAYAGDQKLTNGWSGVWSQSGKNVTVTNASWNGTLAPGAAVTTGAQFTYSGANAAPSSFAVNGTPCTGAHQPPVAVLTSPAPGAVFTAGAAVPLAATAAAADSATVSKVEFYSDTTLLGTDTTAPFTFSATGLATGAHSLYAKAYDSLGASAESAPVGITVAAGPALVAAPSQLGVRQGASGTFDLKLSTAPTTNVTVSVARTSGNTNLTASPATLTFTPANWNTAQKVTVTAAATGTGSAVFTATAPGHAKAEVTVAQLAADSTYDARFLDLHGKITNPANGYFSPEGIPYHSVETLIVEAPDHGHETTSEAYSYLIWLQAMYGKITGDWTKFNGAWDTMEKFMIPTHADTPTTGSYNASKPATYAPEWDLPSQYPSRLDGGVTAGVDPIAGELKSAYGTDDIYGMHWIQDVDNVYGFGNEPGKCSAGPTATGPSYINTFQRGPQESVWETVTHPTCDKFAYGGKNGYLDLFTGDSSYAKQWKFTNAPDADARAVQAAYWADLWAKEQGKGTQVATTVGKAAKMGDYLRYAMFDKYFKKIGNCVGPTTCPAGTGKDSASYLLSWYYAWGGATDTSAGWSWRIGSSHNHSGYQNPLAAYALSEYAPLKPKSATGQADWATSLDRQLEFYRWLQSDEGAIAGGATNSWQGRYATPPAGTPTFHGMYYDEKPVYHDPASNQWFGFQAWSMERVAEYYQQTGDAAAKTVLDKWVTWALSKTTINPDGTYRIPSTLQWSGAPDTWNAANPGANAGLHVTVADYTDDVGVAAAYAKTLTYYAAKSGHAEAKRVAKALLDGMWAHHQDPLGIAVPETRADYNRFDDPVYVPNGWTGTMPNGDPVNATSTFASIRSFYKNDPAWPKIEAYLAGGAAPVFTYHRFWAQADIALAMGSYAELLE

SEQ ID NO: 19 - DNA, 1299 bp, Unknown
  Obtained from environmental sample
gtgaacaatccaagaatactcacgtatcttctgatcggtatcgttgtggcagtgctcattgtgttcgcggcgatgtttgcgaccgtgtcacagagtagactcgatcctgacactcaattttatgttcctcagccgaaccaggatggaatggaacaaatcgcggagcttacctccagcggtaatggagcagatgcgcgcctggtcaaaatgatgatcgagacgccacaagccgtctggttcacgcgaggtacgcccaaaagtgttcaacaggatgttcgaaacactgtgcagcgtgccacagacaagggtatggtgccggtcctcgtcgcgtacaacatcccattccgcgactgtgcccaattcagcgctggcggggccaccaccgaggcagaataccaggactggatcgatggctttgccgcagggattggcgacgcccaggtggtggttattctggagccagatgcgctgggaatcatcccgtggtacgaccccttcggagaccgcgacacgtgggccacgaatccgaactacgacgggtgccagcctcaagaagcggatccggagaccgccgcggctgaccgcttcgcgatgctgaactatgcggttaccaggctcaaggaagatccgcgcacccgcgtctaccttgatggcacgcatagcggatggctcagtgccggagatgcagccgaccgcttgatccaggcaggaatcgcagatgcagatggtttcttcctgaatgtagctggctaccagctgaactcgcagcttgagaagtacggcacctggatctcgaaatgtattgcctttgcatctcactcatcgtcctggggcaaagggcacgcggagtggtgcgcaaaccaatattcccccgcgaacccggaagattttagtacctgggggatgacagaccaatggtacgccgagaatgtcgagaaccagagcctgtggtatgttgagcggcagaccctgtggtcagtagagtcggttctcaagcattttgtgattgatacaagccgcaatggccagggtccctggactccaacaactggccaggattggtgcaacccgcgggatcgtggactgggacttcgaccaacggcaaacaccggcaacgccttgatcgatgcttacctatggataaagatcccgggcgagtctgatggcgagtgtagccgtggccctggcccgcgaggtacgacctcctcgaagtgggacagtgtagatccgactgccggacagtggaaccccagcatggtgcttgagctggtaaagaacgccaatccagcgcttccgtaa

SEQ ID NO: 20 - protein, 432 aa, Unknown
  Obtained from environmental sample
MNNPRILTYLLIGIVVAVLIVFAAMFATVSQSRLDPDTQFYVPQPNQDGMEQIAELTSSGNGADARLVKMMIETPQAVWFTRGTPKSVQQDVRNTVQRATDKGMVPVLVAYNIPFRDCAQFSAGGATTEAEYQDWIDGFAAGIGDAQVVVILEPDALGIIPWYDPFGDRDTWATNPNYDGCQPQEADPETAAADRFAMLNYAVTRLKEDPRTRVYLDGTHSGWLSAGDAADRLIQAGIADADGFFLNVAGYQLNSQLEKYGTWISKCIAFASHSSSWGKGHAEWCANQYSPANPEDFSTWGMTDQWYAENVENQSLWYVERQTLWSVESVLKHFVIDTSRNGQGPWTPTTGQDWCNPRDRGLGLRPTANTGNALIDAYLWIKIPGESDGECSRGPGPRGTTSSKWDSVDPTAGQWNPSMVLELVKNANPALP

SEQ ID NO: 21 - DNA, 2550 bp, Unknown
  Obtained from environmental sample
atgaaaaaggtaagtaatgcacgtgtattgagtttcctattaatacttgttctcatttttgggaatctagcttctgtttttgcaatagaaaattcggatgatagtagtttactaggtaatgataaggtacttaatccttcccaagctggagccctacaaattatagatatagatggtcaaaggaccttaggaactattgatggagatcctattcaattaagaggaatgagtacccatggtcttcaatggtttggagagattataaatgataatgcctttgctgcattagctaatgattgggaatctaacatgatacgactagcgatgtatattggcgaaaatggttatgctaccaatccgagtgtaaaagatttagtgtatgaggggatagaactcgcctttgagcacgacatgtatgtgattgtagactggcatgttcacgcaccaggggatccgagggcagatgtatactccggagcgtatgagttctttgaagagttggcagatcattataaggatcatccaaaaaatcattatattatctgggagcttgcaaacgaaccaagttctaataataacggaggtccaggaatacctaataacgaagaaggctggcaagccgtaaaagaatatgctgaacctattgtagatatgcttcgtgaaaagggagataatatcattcttatcggtagcccaaactggagtcagcgaccagatttagctgcggataatccaatcgatgcggaaaatatcatgtactctgttcatttttatactggaacgcataccccatcagaggatagttacccaccaggcacccctaatacagagcgatctaatgtgatgagtaacgcaagatatgcattagaaaatggtgttgctttgttcgcaacagaatggggtactagtgaagctagtggggataatggaccgtttttagatgaagctgatgtttggcttagttttctaaatgaaaacaacatcagttgggcgaactggtccttaacgaacaaaaatgaaacttcaggagcttttacaccatttatactaaatcaatccgatgcaacgaagcttgatccaggtgatgatcaagtttggtctatggaagagttaagtatctcaggggagtatgttcgtgcaagaattaaaggaattgaatatgatccaattaatcgaacaccaagtgaagattatacaaaagtcatttgggattttgacgatgggacaacgcaaggattccgtgtgaacggggacagtcctattcaagatattcaattagataatgttgataattcattagaaataagtggtcttgatgctagtaacgacacatcagaaggaaattactgggccaatgtacgtttgtcttcagatggatataatcctggggtagacattttaggggcagaggagcttataatggaagtaatcgtggaggaaccaactacagtttctattgcagctattccacaaagttcgaatcacggttgggcaaatcctactcgggcagtaaaagtgacacctgaggattttgagttacaaggagatggaaagttcgttgcaccattatccataacaacagatgatgctccaaacttaaataatatcggaaacgatacagataatagtatgcttacaaacttgattttatttataggtacggaaaatgcggatgttatttcattggataacatctctgtatctggaaatagagaagtaattgttgatcctatagaacatggcccacttggcgtggcaactctaccatctgattttgaggatggcacaagacaaggatggtcttggaatagtgaatccggagtaagagaagctctaactattgaagaagcaaatggttccaacgcactctcctgggaatatgcttacccagaagtaaagcctgaggatgggtgggcatctgcacctagattagatctctggatagaagaactagtcagaggagagaatgattttgttgcgtttgatttttacctagaccccgttcgtgcaacggagggagcaatctctattcatacggtatttcaaccaccagcttcaagttactgggcacaagctccttcgacctttaacatcgaacttgaagaattaaatgaagctaaagtgacaactgatggattataccactatgaagttgcgataaatattcgggatataaataatattgaggacgatacagagctacggaacatgatgttcattttcgcagatatggacagcgactttgccggtcgagtttttattgataatattcggtttgaattgacaacaatcacggtagacgacattttcgaaaaaattgatagttttgttgagaatggggatataagacaccccgcaggagttcaattaacaaatacactgagaacggcagaacgacactataataatggtaaaagtaagcaatctcaaacacatctaaataaatttcactctattattgagggtaatatgatgaagaacgtttctaatgaagtgaaaaaagtattgcgggatgatatagatcgtctttctagtctgtggtttgattaa

SEQ ID NO: 22 - protein, 849 aa, Unknown
  Obtained from environmental sample
  SIGNAL (1)...(28)
MKKVSNARVLSFLLILVLIFGNLASVFAIENSDDSSLLGNDKVLNPSQAGALQIIDIDGQRTLGTIDGDPIQLRGMSTHGLQWFGEIINDNAFAALANDWESNMIRLAMYIGENGYATNPSVKDLVYEGIELAFEHDMYVIVDWHVHAPGDPRADVYSGAYEFFEELADHYKDHPKNHYIIWELANEPSSNNNGGPGIPNNEEGWQAVKEYAEPIVDMLREKGDNIILIGSPNWSQRPDLAADNPIDAENIMYSVHFYTGTHTPSEDSYPPGTPNTERSNVMSNARYALENGVALFATEWGTSEASGDNGPFLDEADVWLSFLNENNISWANWSLTNKNETSGAFTPFILNQSDATKLDPGDDQVWSMEELSISGEYVRARIKGIEYDPINRTPSEDYTKVIWDFDDGTTQGFRVNGDSPIQDIQLDNVDNSLEISGLDASNDTSEGNYWANVRLSSDGYNPGVDILGAEELIMEVIVEEPTTVSIAAIPQSSNHGWANPTRAVKVTPEDFELQGDGKFVAPLSITTDDAPNLNNIGNDTDNSMLTNLILFIGTENADVISLDNISVSGNREVIVDPIEHGPLGVATLPSDFEDGTRQGWSWNSESGVREALTIEEANGSNALSWEYAYPEVKPEDGWASAPRLDLWIEELVRGENDFVAFDFYLDPVRATEGAISIHTVFQPPASSYWAQAPSTFNIELEELNEAKVTTDGLYHYEVAINIRDINNIEDDTELRNMMFIFADMDSDFAGRVFIDNIRFELTTITVDDIFEKIDSFVENGDIRHPAGVQLTNTLRTAERHYNNGKSKQSQTHLNKFHSIIEGNMMKNVSNEVKKVLRDDIDRLSSLWFD

SEQ ID NO: 23 - DNA, 1095 bp, Unknown
  Obtained from environmental sample
atgaagcgtactcgatatggtgtacgaagcccgcgttccgcaccccggttcggtgtactgttcggtgcggcggcggcaggagtgctcatgactggtgctggtcaggaggcgcgttcggaaggcacccggctgacggctgcagctgcggtcccggcgtgggtcccgtcggtcccatcccctggttcgagccgggcggtgctggagacggcggtgctgtacgtggatccgcactcgacggcccggtcccaggtggaaagctggcgcagctcccgtccgcgggaagcagcgctgctggaccgggaagtggcgagtcagccctcggggatctggttcggcgactggaacaggtcggtccgcaacgacgtgagcgcggtgatgaccagtgccgcgcgccagggcgcgctgccggttctggtagcgtacaacatcccgctgcgggactgcggcagccactctgcgggtggtgccggcagcgccggggcgtaccggagctggatcggcgagttcgcccggggcctgaacggccgccgcgccatcgtggtcctggaaccggacgcgcttgcgtccaccgaatgcctgagcacggcgcagcggaacgagcggtttgcgctgctgaagcacgcaacggagacgctctcggcgcagggcgctctggtctatatcgacgcagggcacgcgcagtggctgagtgccgcagaaacggcgtcccggctgatccaggcgggcgtgcggagtgcggccggattctcgctgaacgtgagcaacttcatcggcaatgaagcgaacatccgcttcggcgatgacgtttcgcggcggacgggcggagcgcactacgtcatcgacacgagccgcaacggggccggccctacggcggacctgcagtggtgcaacccgtcgggtcgtgcgctgggcacgcggcccacgacgcgcacggcgcacgcgaagctggatgcgctgctgtggatcaagaagcccggagagtcggacggcagctgcaacggtggtccggcagccggtcagtggtgggcggactatgcgctgggtcttgcccagcggtccacgccggtcatggccctggcggatgcccggcgctga

SEQ ID NO: 24 - protein, 364 aa, Unknown
  Obtained from environmental sample
MKRTRYGVRSPRSAPRFGVLFGAAAAGVLMTGAGQEARSEGTRLTAAAAVPAWVPSVPSPGSSRAVLETAVLYVDPHSTARSQVESWRSSRPREAALLDREVASQPSGIWFGDWNRSVRNDVSAVMTSAARQGALPVLVAYNIPLRDCGSHSAGGAGSAGAYRSWIGEFARGLNGRRAIVVLEPDALASTECLSTAQRNERFALLKHATETLSAQGALVYIDAGHAQWLSAAETASRLIQAGVRSAAGFSLNVSNFIGNEANIRFGDDVSRRTGGAHYVIDTSRNGAGPTADLQWCNPSGRALGTRPTTRTAHAKLDALLWIKKPGESDGSCNGGPAAGQWWADYALGLAQRSTPVMALADARR

SEQ ID NO: 25 - DNA, 1098 bp, Unknown
  Obtained from environmental sample
atgactcggaggtctatcgtgcgttcttcttccaacaagtggcttgtccttgccggtgcggcgctgctcgcctgcaccgccctcgggtgcaagaaaaaaggcgagagcggtgacgtcgcctcggccccggggcaggcccaggcgggcggcaagcagccgtttcccgacgatgcgccgatcaccgaaccgcccgctccgccccctcgtagcggcaatcctctggtgggcgccaagctcttcgtcgacccggaatctttggccatgttgcaggcgaacaagctgcggcgcaccgacccggagaaggcggcgattttggatcgcatcgcccagcagccccaggctttgtggatgggcgagtggaacacgaacatcttccgcgcggtcgagcatttcgtggctcgcgccaaggcggagggcgccgtgcccgtcatgatcgcctacaacatcccccaccgcgactgcgggcagtactctcagggtgggctttcctccaaggaggcttaccagcgctggattcggaacgtcgccgcggggattggcagcgatgcagcggtcgtcgtgctcgagcccgacgcgctcggccacttccaggagtgtttgaccgaggagcagagcgccgagcgcatgttcctgctcagcgacgccgtcaaggtgctgcgccaaaatccgaagacggccgtgtacctggatgccgggcacgcgcgctgggtgccggtggaggagatggccgagcgcctcaagctcgcgggcatcgagcacgcccatggcttttcgctcaacacctcgaactacgtgggcaccgaggagaacgccgcttacggccacaagctcgtcgaggccctgggtgggaacgtgcgcttcgtcatcgacacgagccgcaatggggcgggcccctacgaggaggccaagaacgccgaggagagctggtgcaacccgcccggtcgcaagatcggcaagccgccgaccaccgagacgggggatcccctcatcgacggattcctttggctgaagcgcccgggcgagtcggacggtcagtgcaacggcgggcccaaggccggtgtgttctggctggagcaggctctccagcaggcccagtaa

SEQ ID NO: 26 - protein, 365 aa, Unknown
  Obtained from environmental sample
  SIGNAL (1)...(29)
MTRRSIVRSSSNKWLVLAGAALLACTALGCKKKGESGDVASAPGQAQAGGKQPFPDDAPITEPPAPPPRSGNPLVGAKLFVDPESLAMLQANKLRRTDPEKAAILDRIAQQPQALWMGEWNTNIFRAVEHFVARAKAEGAVPVMIAYNIPHRDCGQYSQGGLSSKEAYQRWIRNVAAGIGSDAAVVVLEPDALGHFQECLTEEQSAERMFLLSDAVKVLRQNPKTAVYLDAGHARWVPVEEMAERLKLAGIEHAHGFSLNTSNYVGTEENAAYGHKLVEALGGNVRFVIDTSRNGAGPYEEAKNAEESWCNPPGRKIGKPPTTETGDPLIDGFLWLKRPGESDGQCNGGPKAGVFWLEQALQQAQ

SEQ ID NO: 27 - DNA, 600 bp, Agaricus bisporus ATCC 62489
gtgcaggacggcgtcgtcatccccaactcggcctctaccatcagtggtgtgagtggtaactctattacctcagacttctgcactgcccagaagactgccttcggtgatgaggacgttttcgacgagcgcggagggttggcgggtcttggtgccggtctcgctgacggcatggtcctggtcatgagtctctgggatgaccactatgccgacatgctctggctcgacagcatctacccaacaaacgatacctccaccacccccggtgccgctcgtggtacctgtgacatctcatctggagtcccagctaccattgaagactccgacgcaagcgcctatgtcatctactcaaacattaaggttggtccgattggctctaccttctcgtcgggtacctccagttctagcactagctcgagcactacttccaagactacttccacatccaccaagaccacctctaccactaccaccacggctgctagcaccactggtgctgctcactacgcccagtgtggtggatctggatggactggtgccactgcttgtgccagcccctacacctgcaccgcgcagaatgcctactactctcagtgcctataa

SEQ ID NO: 28 - protein, 199 aa, Agaricus bisporus ATCC 62489
  DOMAIN (1)...(129): Glycosyl hydrolase family 7
MQDGVVIPNSASTISGVSGNSITSDFCTAQKTAFGDEDVFDERGGLAGLGAGLADGMVLVMSLWDDHYADMLWLDSIYPTNDTSTTPGAARGTCDISSGVPATIEDSDASAYVIYSNIKVGPIGSTFSSGTSSSSTSSSTTSKTTSTSTKTTSTTTTTAASTTGAAHYAQCGGSGWTGATACASPYTCTAQNAYYSQCL

SEQ ID NO: 29 - DNA, 1605 bp, Agaricus bisporus ATCC 62489
atgtctgctgcactgtcttatcgcatttacaagaatgctctcctcttcactgccttcttgactgccgctcgggcacagcaagttggcacctcaaccgctgaggttcacccgtctttgacctggtcgcaatgtaccagcggtggaagctgcaccacgcagagcggctcggttgtcatcgatgccaactggcgatgggtccacaacgtcggtggctctaccaactgctacaccggtaacgaatgggacaccacgctttgccctgacgatgttacctgcgcgaccaactgcgctttggacggtgccacatacgaagctacctacggtgtaaccaccagcggtgatgagcttcgtctgaactttgttactactgcctcgcagaagaacattggatctcgtctgtacctgatggaggatgacaccacctaccagatattcgatctgctgaatcaggaattcaccttcgacgtggacgtctctaaccttccctgtggtttgaacggtgccctctactttgtcgctatggactctgacggtggcatggctcgcttccccgcaaacaaggccggagcccaatatggaaccggttactgtgactctcagtgcccccgggacctcaaattcatcgatggtgaggccaactgcgatggctgggttccttccacaaccgatgtaaactctggtattggtaaccacggttcctgctgcgcggaaatggatatctgggaggctaactcgatctcgaacgcggtcactcctcacccttgtgaaactccaacccagactatgtgcgaggaagatgcttgtggtggtacttacagcactgatcgctacggtggcacttgcgatcctgatggatgtgatttcaacccttaccgcatgggtaacaccacattcttcggtcctgacatgaccgtcgataccaactccgtcttcactgttgtgactcagttcatcaccgatgatggcacctccacgggtactctgagtgagatcaagcggttctacgtgcaggacggcgtcgtcatccccaactcggcctctaccatcagtggtgtgagtggtaactctattacctcagacttctgcactgcccagaagactgccttcggtgatgaggacgttttcgacgagcgcggagggttggcgggtcttggtgccggtctcgctgacggcatggtcctggtcatgagtctctgggatgaccactatgccgacatgctctggctcgacagcatctacccaacaaacgatacctccaccacccccggtgccgctcgtggtacctgtgacatctcatctggagtcccagctaccattgaagactccgacgcaagcgcctatgtcatctactcaaacattaaggttggtccgattggctctaccttctcgtcgggtacctccagttctagcactagctcgagcactacttccaagactacttccacatccaccaagaccacctctaccactaccaccacggctgctagcaccactggtgctgctcactacgcccagtgtggtggatctggatggactggtgccactgcttgtgccagcccctacacctgcaccgcgcagaatgcctactactctcagtgcctataa

SEQ ID NO: 30 - protein, 534 aa, Agaricus bisporus ATCC 62489
MSAALSYRIYKNALLFTAFLTAARAQQVGTSTAEVHPSLTWSQCTSGGSCTTQSGSVVIDANWRWVHNVGGSTNCYTGNEWDTTLCPDDVTCATNCALDGATYEATYGVTTSGDELRLNFVTTASQKNIGSRLYLMEDDTTYQIFDLLNQEFTFDVDVSNLPCGLNGALYFVAMDSDGGMARFPANKAGAQYGTGYCDSQCPRDLKFIDGEANCDGWVPSTTDVNSGIGNHGSCCAEMDIWEANSISNAVTPHPCETPTQTMCEEDACGGTYSTDRYGGTCDPDGCDFNPYRMGNTTFFGPDMTVDTNSVFTVVTQFITDDGTSTGTLSEIKRFYVQDGVVIPNSASTISGVSGNSITSDFCTAQKTAFGDEDVFDERGGLAGLGAGLADGMVLVMSLWDDHYADMLWLDSIYPTNDTSTTPGAARGTCDISSGVPATIEDSDASAYVIYSNIKVGPIGSTFSSGTSSSSTSSSTTSKTTSTSTKTTSTTTTTAASTTGAAHYAQCGGSGWTGATACASPYTCTAQNAYYSQCL

SEQ ID NO: 31 - DNA, 1611 bp, Unknown
  Obtained from environmental sample
atgtcttcctttcagatctaccgagcagctctgctcctctccattcttgccactgccaatgctcagcaggttggaacctacaccactgagacgcatccgtctttgacctggcaaacctgcaccagcagtggcagctgcactactaatgacggcgcggtggtcattgatgccaattggcgctgggtgcactcgacctccagctccaccaactgctacaccggcaacgagtgggacacctcaatctgtaccgacgatgtgacctgcgccgcgaactgcgcgctcgatggtgccacttacgaggcgacctacggtgtgaccacgtccggcgacgagctgcgcctgaacttcgtcacccagggctccagcaagaatatcgggtcccggctgtatctcatgagcgacgacagtacctatgagatgttcaagctcctcggccaggagtttacctttgacgtggacgtgtccaacctcccctgcggcctcaacggcgcgctgtacttcgtcgccatggacgctgacggcggcacctcggagtactctggcaacaaggccggcgccaaatacggtaccggatactgcgattcgcagtgcccccgcgacctgaagttcatcaatggcgaagccaactgcgacggctgggagccctctagcaacaacgtcaacaccggtgttggcgaccacggctcctgctgccctgagatggacatctgggaagcgaacagcatctccaacgccttcaccgcacacccatgcgactccgtcagccagaccatgtgcgacggcgactcctgcggtggaacttacagcgccagcggcgaccgctacagcggcacttgcgaccccgacggctgcgactacaacccctaccgtctgggcaacacggacttttacggtcccggcctgaccgtcgacacgaatagccccttcaccgtcgtcacccagttcatcaccgacgacggcacctcctccggtaccctgaccgagatcaagcggttgtacgtgcaaaacggcgaggtcatcgccaacggcgcctccacctactccagcgtcaacggcagctcgatcacttccgatttctgtgaatcagaaaagactctgtttggcgatgagaacgtgtttgacacgcacggcggtctcgcaggcatgggcgaggctatggcgaatggaatggtcttggtcttgagtctgtgggatgactacgccgccaacatgctctggcttgacagcgactaccccgtcaactcgtcggcctcgacaccaggtgtggctcgcggtacttgcagcactgactcgggtgtcccggctactgtggaggcggattcacccaatgcgtatgtcacgtactcgaacattaagttcgggcccattggctcgacttactccagtggatcttcttccgggtcggggtctagctccagctccagctctactaccacgaaggcgacttcgacgaccttgaagactaccacgacgaccagcagcggtagcagttctacttcggcggcgcaggcatatggacagtgtggtggacagagctggacgggtccgaccacttgtgtgagtggatacacttgcacgtatcagaatgcgtactactcgcagtgtttgtag

SEQ ID NO: 32 - protein, 536 aa, Unknown
  Obtained from environmental sample
MSSFQIYRAALLLSILATANAQQVGTYTTETHPSLTWQTCTSSGSCTTNDGAVVIDANWRWVHSTSSSTNCYTGNEWDTSICTDDVTCAANCALDGATYEATYGVTTSGDELRLNFVTQGSSKNIGSRLYLMSDDSTYEMFKLLGQEFTFDVDVSNLPCGLNGALYFVAMDADGGTSEYSGNKAGAKYGTGYCDSQCPRDLKFINGEANCDGWEPSSNNVNTGVGDHGSCCPEMDIWEANSISNAFTAHPCDSVSQTMCDGDSCGGTYSASGDRYSGTCDPDGCDYNPYRLGNTDFYGPGLTVDTNSPFTVVTQFITDDGTSSGTLTEIKRLYVQNGEVIANGASTYSSVNGSSITSDFCESEKTLFGDENVFDTHGGLAGMGEAMANGMVLVLSLWDDYAANMLWLDSDYPVNSSASTPGVARGTCSTDSGVPATVEADSPNAYVTYSNIKFGPIGSTYSSGSSSGSGSSSSSSSTTTKATSTTLKTTTTTSSGSSSTSAAQAYGQCGGQSWTGPTTCVSGYTCTYQNAYYSQCL

SEQ ID NO: 33 - DNA, 1515 bp, Unknown
  Obtained from environmental sample
atgtatcagaaattggccgccatctcggccttcctggctgctgctcgtgctcagcaggtctgcacccaacaagcggagactcacccacctctgacatggcagaaatgcacagcttccggttgcacagctcaatcaggatccgtggttcttgatgccaactggcgttggactcacgataccaagagcactaccaactgctacgatggcaatacctggagctcaaccttgtgccccgacgatgcgacttgtgccaagaactgttgtttggacggagccaactactcaggcacttacggagtcaccaccagcggcgacgctctcaccattcaatttgttactcagtcgaatgtcggctcccgtctttacctgatggcaactgataccacttaccaggagttcacactgtctggcaacgagttctcctttgacgttgatgtttcccaactgccttgtggcttgaacggagcgctgtactttgtttccatggatgccgatggtggcaaaagcaagtaccccggcaatgctgccggtgccaaatatggcacaggttactgtgacagccaatgccctcgtgacctgaagttcatcaacggtcaggccaacgttgatggttggcaaccatcttccaacaacgccaacactggtattggtaaccacggaagctgctgctcagagatggatatctgggaggcaaactccatttctgaggctcttactcctcacccttgcgaggatgtcggccagacgatgtgcagcggcgattcttgcggtggaacctactccgatgaccgatatggcggaacctgcgaccctgatggctgcgactggaacccataccgcctgggtaacacctccttctacggacccggctcatcatttactctcgacaccaccaagaagttgaccgttgtgacccagtttgccaccaacggtgcaattagccgatactatgtccagaatggagtcaagttccagcagcccaacgctcaagtcggcagctactctggcaacaccatcaacgccgactactgtgcagctgagcagacagccttcggcggaacctcattcacagacaagggcggccttgcccagatcaacaaggcattccagggcggaatggtcttggtcatgagcttgtgggatgattacgctgtcaacatgctttggttggattccacctacccagcaaacgccactggcacccccggcgccaagcgaggaagctgctctaccagctctggtgttcccgcccaagtcgaagctcagtcacccaactccaaggttgtcttctccaacatccgcttcggacccattggcagcactggcggcaacactggcagcaaccctcccggcacttcgaccactcgggcgcctccgtccagcactggaagctcccccaccgccacccagacacactacggccaatgtggtggaactggctggggcggacctaccatatgcgctagcggctacacttgccaggttctgaacccattctactctcagtgcctgtaa

SEQ ID NO: 34 - protein, 504 aa, Unknown
  Obtained from environmental sample
  DOMAIN (19)...(444): Glycosyl hydrolase family 7
MYQKLAAISAFLAAARAQQVCTQQAETHPPLTWQKCTASGCTAQSGSVVLDANWRWTHDTKSTTNCYDGNTWSSTLCPDDATCAKNCCLDGANYSGTYGVTTSGDALTIQFVTQSNVGSRLYLMATDTTYQEFTLSGNEFSFDVDVSQLPCGLNGALYFVSMDADGGKSKYPGNAAGAKYGTGYCDSQCPRDLKFINGQANVDGWQPSSNNANTGIGNHGSCCSEMDIWEANSISEALTPHPCEDVGQTMCSGDSCGGTYSDDRYGGTCDPDGCDWNPYRLGNTSFYGPGSSFTLDTTKKLTVVTQFATNGAISRYYVQNGVKFQQPNAQVGSYSGNTINADYCAAEQTAFGGTSFTDKGGLAQINKAFQGGMVLVMSLWDDYAVNMLWLDSTYPANATGTPGAKRGSCSTSSGVPAQVEAQSPNSKVVFSNIRFGPIGSTGGNTGSNPPGTSTTRAPPSSTGSSPTATQTHYGQCGGTGWGGPTICASGYTCQVLNPFYSQCL

SEQ ID NO: 35 - DNA, 1350 bp, Cochliobolus heterostrophus ATCC 48331
atgagatttccttcaatttttactgctgttttattcgcagcatcctccgcattagctgctccagtcaacactacaacagaagatgaaacggcacaaattccggctgaagctgtcatcggttactcagatttagaaggggatttcgatgttgctgttttgccattttccaacagcacaaataacgggttattgtttataaatactactattgccagcattgctgctaaagaagaaggggtatctctcgagaaaagagaggctttccccaaaccagagcccagcaataccaccgtcaacccatggattggcaaggaccgctatgttgtcgaaagctacggcaagaagcttgaccaaaccattgcttccttcctatcaaagaatgactccctcaacgcagcacgaacccgcactgtggctaagaagacatccaccttcgtatgggttacatcgcgcgctggacttagccagatccccgaagccattcaacaagcccgccgtcaacaaaagggccgaaagaggatgattgtcggccttgtcctttacaatctccccgaccgtgactgctctgctggagagtctgccggagagctcagctccgccaaagacggcctgaacatctacaagcacgaattcgtcgacaagtacgcacagctcgtatccgaggccaaggatctcgacttcgccattgttctcgagcccgactcgctcggcaacgctgtcaccaaccaaggtattcccttctgcgccaacgccacccccatctacgagcaaggtatcgcttacgccattgccaagctgcagttccccaatgtatccctatacatggatgctgctcatggaggctggcttggatgggccgacaacctgaaacccacagcccagatctttgccagagttgtcgaagcggctaagaagatcaacccagcggccaagatccgtggttactctaccaacgtatccaactacaaccctttcaacgccaaggtccgcgagaactacaccgaatggtctccatcgtgggatgaaagccactacgctacctctcttggagcggcaatggcagctgagggcatgccaaccaacttcatcatcgaccagggccgtgttgccctccccggtgctcgcaaggagtggggcgagtggtgcaacgtttcgccctctggctttggactgcgccctggagctgcaccaaacaacaccaacgtcgactcgattgtctggattaagcccggtggtgagagtgacggagcctgcggtctggctggtgcgcctgttgctggtgcttggttcgacgactacgttcagatgctcgtcaagaacgccgaccctcctcttgagcctacctactag

SEQ ID NO: 36 - protein, 449 aa, Cochliobolus heterostrophus ATCC 48331
  DOMAIN (1)...(86): Mating factor alpha precursor N-terminus
MRFPSIFTAVLFAASSALAAPVNTTTEDETAQIPAEAVIGYSDLEGDFDVAVLPFSNSTNNGLLFINTTIASIAAKEEGVSLEKREAFPKPEPSNTTVNPWIGKDRYVVESYGKKLDQTIASFLSKNDSLNAARTRTVAKKTSTFVWVTSRAGLSQIPEAIQQARRQQKGRKRMIVGLVLYNLPDRDCSAGESAGELSSAKDGLNIYKHEFVDKYAQLVSEAKDLDFAIVLEPDSLGNAVTNQGIPFCANATPIYEQGIAYAIAKLQFPNVSLYMDAAHGGWLGWADNLKPTAQIFARVVEAAKKINPAAKIRGYSTNVSNYNPFNAKVRENYTEWSPSWDESHYATSLGAAMAAEGMPTNFIIDQGRVALPGARKEWGEWCNVSPSGFGLRPGAAPNNTNVDSIVWIKPGGESDGACGLAGAPVAGAWFDDYVQMLVKNADPPLEPTY

SEQ ID NO: 37 - DNA, 2226 bp, Clostridium thermocellum ATCC 27405
atggtaaaaagcagaaagatttctattctgttggcagttgcaatgctggtatccataatgatacccacaactgcattcgcaggtcctacaaaggcacctacaaaagatgggacatcttataaggatcttttccttgaactctacggaaaaattaaagatcctaagaacggatatttcagcccagacgagggaattccttatcactcaattgaaacattgatcgttgaagcgccggactacggtcacgttactaccagtgaggctttcagctattatgtatggcttgaagcaatgtatggaaatctcacaggcaactggtccggagtagaaacagcatggaaagttatggaggattggataattcctgacagcacagagcagccgggtatgtcttcttacaatccaaacagccctgccacatatgctgacgaatatgaggatccttcatactatccttcagagttgaagtttgataccgtaagagttggatccgaccctgtacacaacgaccttgtatccgcatacggtcctaacatgtacctcatgcactggttgatggacgttgacaactggtacggttttggtacaggaacacgggcaacattcataaacaccttccaaagaggtgaacaggaatccacatgggaaaccattcctcatccgtcaatagaagagttcaaatacggcggaccgaacggattccttgatttgtttacaaaggacagatcatatgcaaaacagtggcgttatacaaacgctcctgacgcagaaggccgtgctatacaggctgtttactgggcaaacaaatgggcaaaggagcagggtaaaggttctgccgttgcttccgttgtatccaaggctgcaaagatgggtgacttcttgagaaacgacatgttcgacaaatacttcatgaagatcggtgcacaggacaagactcctgctaccggttatgacagtgcacactaccttatggcctggtatactgcatggggtggtggaattggtgcatcctgggcatggaagatcggatgcagccacgcacacttcggatatcagaacccattccagggatgggtaagtgcaacacagagcgactttgctcctaaatcatccaacggtaagagagactggacaacaagctacaagagacagcttgaattctatcagtggttgcagtcggctgaaggtggtattgccggtggagcaaccaactcctggaacggtagatatgagaaatatcctgctggtacgtcaacgttctatggtatggcatatgttccgcatcctgtatacgctgacccgggtagtaaccagtggttcggattccaggcatggtcaatgcagcgtgtaatggagtactacctcgaaacaggagattcatcagttaagaatttgattaagaagtgggtcgactgggtaatgagcgaaattaagctctatgacgatggaacatttgcaattcctagcgacctcgagtggtcaggtcagcctgatacatggaccggaacatacacaggcaacccgaacctccatgtaagagtaacttcttacggtactgaccttggtgttgcaggttcacttgcaaatgctcttgcaacttatgccgcagctacagaaagatgggaaggaaaacttgatacaaaagcaagagacatggctgctgaactggttaaccgtgcatggtacaacttctactgctctgaaggaaaaggtgttgttactgaggaagcacgtgctgactacaaacgtttctttgagcaggaagtatacgttccggcaggttggagcggtactatgccgaacggtgacaagattcagcctggtattaagttcatagacatccgtacaaaatatagacaagatccttactacgatatagtatatcaggcatacttgagaggcgaagctcctgtattgaattatcaccgcttctggcatgaagttgaccttgcagttgcaatgggtgtattggctacatacttcccggatatgacatataaagtacctggtactccttctactaaattatacggcgacgtcaatgatgacggaaaagttaactcaactgacgctgtagcattgaagagatatgttttgagatcaggtataagcatcaacactgacaatgccgatttgaatgaagacggcagagttaattcaactgacttaggaattttgaagagatatattctcaaagaaatagatacattgccgtacaagaactaa

SEQ ID NO: 38 - protein, 741 aa, Clostridium thermocellum ATCC 27405
MVKSRKISILLAVAMLVSIMIPTTAFAGPTKAPTKDGTSYKDLFLELYGKIKDPKNGYFSPDEGIPYHSIETLIVEAPDYGHVTTSEAFSYYVWLEAMYGNLTGNWSGVETAWKVMEDWIIPDSTEQPGMSSYNPNSPATYADEYEDPSYYPSELKFDTVRVGSDPVHNDLVSAYGPNMYLMHWLMDVDNWYGFGTGTRATFINTFQRGEQESTWETIPHPSIEEFKYGGPNGFLDLFTKDRSYAKQWRYTNAPDAEGRAIQAVYWANKWAKEQGKGSAVASVVSKAAKMGDFLRNDMFDKYFMKIGAQDKTPATGYDSAHYLMAWYTAWGGGIGASWAWKIGCSHAHFGYQNPFQGWVSATQSDFAPKSSNGKRDWTTSYKRQLEFYQWLQSAEGGIAGGATNSWNGRYEKYPAGTSTFYGMAYVPHPVYADPGSNQWFGFQAWSMQRVMEYYLETGDSSVKNLIKKWVDWVMSEIKLYDDGTFAIPSDLEWSGQPDTWTGTYTGNPNLHVRVTSYGTDLGVAGSLANALATYAAATERWEGKLDTKARDMAAELVNRAWYNFYCSEGKGVVTEEARADYKRFFEQEVYVPAGWSGTMPNGDKIQPGIKFIDIRTKYRQDPYYDIVYQAYLRGEAPVLNYHRFWHEVDLAVAMGVLATYFPDMTYKVPGTPSTKLYGDVNDDGKVNSTDAVALKRYVLRSGISINTDNADLNEDGRVNSTDLGILKRYILKEIDTLPYKN

SEQ ID NO: 39 - DNA, 3087 bp, Unknown
  Obtained from environmental sample
atgttacgcaaggagttatttatacgcagtaagccgaaactccgggtgcaggtttgtgcttttttagccggcggaataagagggcgtgttcctaagattatgataactgctatggttatacttggcatgttatccgcttccttcacacctgttaagccaagcaaggcatccgaaatcactgccgcaggaacggatacctaccaaaacagatttctggaactctggggagatattacggacccgaacaacgggtatttcagtcctcagggtattccataccattctgttgagactttaattgtagaagctccggattatggtcatgtaaccaccagtgaagctttcagctattatatgtggctggaggctatgtatggtaaattcacaggtgatttcagcggctttgaaacagcgtggaacaaagcggaagcctacataattccaacggaaaaggaccagcctaattccagcatgagtaagtatacagcaagtaagcctgctacttatgccccggaatgggaattacccagccaataccctgcgcagctgaattcaggtgcggctgtcggaatcgaccccattaacagcgatctggtttctacttacggcaccagtactatgtatggaatgcattggctgttagatgcagataactggtatggttttggaagcagaggtgatggtatgacttcaccctcctatatcaataccttccagaggggggaacaggaatctacctgggagacaattccacagccttcctgggatgcaatgaaattcggcggcaagaacgggtatcttgacctttttacgggagacagcagctatgcaacccagtttaagtatacagatgctccggatgcagatgcccgtgccattcaggctacttactgggctgaccaatgggcgaaggaatatggtattaaccttggaacctatgatgcaaaagccagtaagatgggggattatttaaggtatgccatgtttgataaatacttccgaaaaatcggttctccgaccgttgccggtaccggatatgatgcggcacattatctgatgtcctggtattatgcctggggcgggggagtaagctccagctgggcctggaagatcggaagcagccataatcactttgggtatcaaaatcccatgactgcctggattttatcaaaagatgcagacttaaaacctctttctcagaacggagccggcgattgggggacaagccttaacaggcagcttgagttctatcagtggttacaatcttctgaaggtgcgattgcaggcggagccagcaactccaacaatggccgttatgaagcgtggccggccggcacgtctactttttatggaatgggatatgaagcaaatcctgtctatgcagatcccggcagcaatacctggtttggttttcaggcatggtccatgcagcgtgtagcggaatattattacaaaacaaacgatgacagagcaaaggctatcctggataaatgggtaagctgggtcaagtcggtggtgcagcttaatgcagacggaacttttgctattccaagcagtattgactggtcgggacagcctgatacctggaccggcacttataccggcaattcgaacctccatgtgaccgttaccggttacggcacagatcttggcgtaaccggttcacttgccaatgccttactgtattacagcaaagcctccggggatgatacttccagagcaatagctaaggaactattggatcgtatgtggaatctatacagagatgataagggccttgcagcaccggaagcaagggctgactacaaccggttctttgatcaggaaatctttgtacccgtcggctggacaggaactatgcctaatggtgatgttattaaatccggcgataaatttctggatatccgttcgaaatataaaaatgatccggattatcagaaggttctgacagcgtacaacaatggtaccgatccagtcttttactatcaccgcttctgggcacagtgcgatattgctattgcaaatggtgtctattccattttgtttggaaccggcagtgatccggtaaataattctgccataagtcctttggcggcagctttcgataagaatactgaaaagcaaagcaatatatcggtagcgcttaccttaaatggcaatacctttaccggtattaaggacggaaatacttatttaaccgcaggtacagattataccttaacgggcaatacggtcagtctgtccaaaaactatttagcaggaaagagtataggggagctattgcttacttttgatttcagtaagggtattgatccggtattgacggtaacggtcattgacaccacgccaagtggttcagtttctcctgctgccgccacttttgataagaatcctgcaaagcaggcggatataataacttcattaactacggcagggtatacgctgaatggtatcaagaggggaagtcaggcgctgacgcaaggtgtagattatactatagcaggaagcacagttacattcttaaaaacgtccctggcggctctgcagacaggaagctacaatctagtatttgatttaagtgccggaacagatcctgtactggttctgacgatagttgatacctccattgcaccgggcagtattaaggtacagatgtacaatgggacaacatcagcacagaccaatggactgagcccaagattcaggctttacaataccggtacagtcagtataaaactttctgatgttaaaatcagatattattacacgataaacggagagttggcccagaacttctggtgtgactggtcaaccataggcagcggcaatgtcaccgggacctttgttaaaatgcctgccgcaaagacagatgccgattattatctggagatcggatttgcctccggagcgggaaatctggcagcaggacaggctattgaggtacagggcagattttcaaaaaatgactggacgaattatactcagaccgatgattattcctttgcaggttccggaagcagttatgcggattggccaaagattacgggatatatttctgacagtctgaaatggggagcggaaccatag

SEQ ID NO: 40 - protein, 1028 aa, Unknown
  Obtained from environmental sample
MLRKELFIRSKPKLRVQVCAFLAGGIRGRVPKIMITAMVILGMLSASFTPVKPSKASEITAAGTDTYQNRFLELWGDITDPNNGYFSPQGIPYHSVETLIVEAPDYGHVTTSEAFSYYMWLEAMYGKFTGDFSGFETAWNKAEAYIIPTEKDQPNSSMSKYTASKPATYAPEWELPSQYPAQLNSGAAVGIDPINSDLVSTYGTSTMYGMHWLLDADNWYGFGSRGDGMTSPSYINTFQRGEQESTWETIPQPSWDAMKFGGKNGYLDLFTGDSSYATQFKYTDAPDADARAIQATYWADQWAKEYGINLGTYDAKASKMGDYLRYAMFDKYFRKIGSPTVAGTGYDAAHYLMSWYYAWGGGVSSSWAWKIGSSHNHFGYQNPMTAWILSKDADLKPLSQNGAGDWGTSLNRQLEFYQWLQSSEGAIAGGASNSNNGRYEAWPAGTSTFYGMGYEANPVYADPGSNTWFGFQAWSMQRVAEYYYKTNDDRAKAILDKWVSWVKSVVQLNADGTFAIPSSIDWSGQPDTWTGTYTGNSNLHVTVTGYGTDLGVTGSLANALLYYSKASGDDTSRAIAKELLDRMWNLYRDDKGLAAPEARADYNRFFDQEIFVPVGWTGTMPNGDVIKSGDKFLDIRSKYKNDPDYQKVLTAYNNGTDPVFYYHRFWAQCDIAIANGVYSILFGTGSDPVNNSAISPLAAAFDKNTEKQSNISVALTLNGNTFTGIKDGNTYLTAGTDYTLTGNTVSLSKNYLAGKSIGELLLTFDFSKGIDPVLTVTVIDTTPSGSVSPAAATFDKNPAKQADIITSLTTAGYTLNGIKRGSQALTQGVDYTIAGSTVTFLKTSLAALQTGSYNLVFDLSAGTDPVLVLTIVDTSIAPGSIKVQMYNGTTSAQTNGLSPRFRLYNTGTVSIKLSDVKIRYYYTINGELAQNFWCDWSTIGSGNVTGTFVKMPAAKTDADYYLEIGFASGAGNLAAGQAIEVQGRFSKNDWTNYTQTDDYSFAGSGSSYADWPKITGYISDSLKWGAEP

SEQ ID NO: 41 - DNA, 1485 bp, Unknown
  Obtained from environmental sample
atgaagacagttttaagagtattgttcttagcggtggctatagtagcctccgttgcaaatgctaggccaacaagcccagagccgatgtctggaaagactgcgttgcagttttgggcagataatgacattaaactcggctggaatttaggcaatacgctggatgcggtcaatgacaacgtggcaacagaaggtcaatggagctggggcggtccgggtccggcaactcaagcactgttcaatggtgttaaacaatccggttttgatatagtcagaattcccgtcacttggattgggcatataggagcctcccctaattacaccataacagaagcgaggttgcaacgtgtagccgaagttgttgattatgctaaaaccgctggtgtgaaagcggtgattatcaatgtgcaccacgatgggaactgcacggagtgcccgtctggaaacacatggggatttgtggatcttaagggagcagaaaacaatagcacattaaaaaacacagtgcaagatgaacttggcaaggtttggacacagatagccaactactttaaaaattacggagactttctgatttttgaaactctgaatgaagttcatcagggtaattggggaaccgtagccaatactgaagcctaccgaaagcagcaagatatactctttgattggaattcggcagcacttaatgcaattcgcgcaaccggaggcaataatgctactcgctttgttgcagttccgggtttgggcagcacagagccagaaaccgttattaacgcacataaccgccaaaaattgttgccaagtgacggtacaaatggcactagcaaactgattgtttctgttcattactaccatccgtggcaatataccgtagcagatgtaaacggtgcagattatacaactgagtggaaacaatccgagcgcggtcatccagctagtgcaatgggttcgctcaaaagtactttcataaataatggaattgcggtttatgctggtgaatggggagcaccaaacgggaaacgttataattcgtcagcagatataaaagctactcatcgcttgtatatcaagaccgtggcaacccaagctgttgagaacggtgtagtgcctatttactgggacgatggtggcaacttcaaattgcttgaacgctcaaacggccaagctcaatcaaattccttctacgcagaagtattatcggatattatgagcgcaaaaggcacgtcatctcccagcttgccgtctagcagttcttctaacccaagcagttccagcgcagtatcatcaagcagcggtgttgaaaatagctctagcagcgaaggtgaagatgtctcccctattctccactcctcactctccactctcaactctcaattagctagttactattccctcaaaggcgaaccgcttggcaatgcaaagccgcaaaaagctggcatctatatagtcaagcagggaaattcagttagaaaaatcgcggtgaagtga

SEQ ID NO: 42 - protein, 494 aa, Unknown
  Obtained from environmental sample
MKTVLRVLFLAVAIVASVANARPTSPEPMSGKTALQFWADNDIKLGWNLGNTLDAVNDNVATEGQWSWGGPGPATQALFNGVKQSGFDIVRIPVTWIGHIGASPNYTITEARLQRVAEVVDYAKTAGVKAVIINVHHDGNCTECPSGNTWGFVDLKGAENNSTLKNTVQDELGKVWTQIANYFKNYGDFLIFETLNEVHQGNWGTVANTEAYRKQQDILFDWNSAALNAIRATGGNNATRFVAVPGLGSTEPETVINAHNRQKLLPSDGTNGTSKLIVSVHYYHPWQYTVADVNGADYTTEWKQSERGHPASAMGSLKSTFINNGIAVYAGEWGAPNGKRYNSSADIKATHRLYIKTVATQAVENGVVPIYWDDGGNFKLLERSNGQAQSNSFYAEVLSDIMSAKGTSSPSLPSSSSSNPSSSSAVSSSSGVENSSSSEGEDVSPILHSSLSTLNSQLASYYSLKGEPLGNAKPQKAGIYIVKQGNSVRKIAVK

SEQ ID NO: 43 - DNA, 1854 bp, Unknown
  Obtained from environmental sample
atggatttggcgttaaagaatttgacctttgccgcgccgtcatatatattaatgaatagaccgcaaccggttgctatccacccacccaaaggaggctcgttgcagaggacgcccgttatccgccgaaacagtcggctgtccgccgccgccgccgttttgtcagcgttggcggcgttcaccctgagcgctcacgctaccagcatggaaaatatcaggctaaaccagatcggctactacccgaactcgcgcaaggtcgcgaccgtcgtcatgggcgacgacaagagcgtgccgtcggagttcctcgtcgtggggctgcctgggggcaagccggtctttaggggcaaactctccgccgaactttttctgtgggaggagtccggggagagcggtttccgcgccgacttttcggcggtcagcgcccccgggcagtacaaactggtaatcttgggcaacgtgccctacaagagcgagtcctgcccgttcgcgatctccgaccgagcgttcaaggacgtggccgtagcctccatgcgcgcctactacttccagcgttgctcctacgcgctctccaagaaatacgccggcaagtgggcccgcgccgccgggcatcccgacgcagacgtcacatatcacccgtcgagcggccactgggagggggagggcaaggttacgacccccggcggctggtacgacgccggggacttcggcaagtacgtcgtcaactcaggcataacggttgggacgctcttggcgttctacgagcaatttcccggctacttccccgacaaaagtttggatatcccggagtcgggcagcgggcgccccgatatcatcgacgaggtgaagtttaacttggattggatgaagactatgcaggatgtcgacggcggcgtcttcttcaaggtgaccaccctctcgttccccggctacatcatgccggaagaggacaagggtcagaggttcgtgataggcaagagcacgacgtcgtctctgaacttcgctgcggcgatggcgatggcggcgagggtgtacgcgcccttcgacagcgcctacgcgaaaaactgcgccgagcgggcgctcttggcctgggattgggcgcaaaagaatccaaacgcggcgttcaggaatccggcggacgtcaaaacaggtgagtacaaggacgcggcgttcgacgacgagttcgtctgggcggcggcggaactcttcatcaccacgaaagaaaagcgtttcgccgattttctgaaaggaaaggacgtctcctacgtcggcgaaccgtcatggcaaaacgtccgctccctggcggcgctctcgctggcctccgtcaagaacgacctggagccgcaacgcctggaagccgtccgcaagtcgataacaaaaacagccgacaagtggctgtcggagatggacaagcatttatacagaatgccgaacatgaagttcatctggggctcaaactccagctttgccaacataggggtagggatgatttacgcccacataatatccggtgatgagaaatatctattaggcgcggcggagatagccgattatctcttagggaaaaacgcggtgggaatctcgttcgtcagcgccttcggaacaaaggcgatgtcaaacccgcaccaccggcaaagcgtagcgggaaaagtaggcgccatccccggtttcttggcgggcggccccaacgcgggtcagcaagacagcgcccatggggtgacttatagttcaaaattacctgcaaagagttacgaagacgtctacaagagctatgcctcaaacgaggtagcgataaattggaacgctccggcggtattcttatttggggcggtagacgcgttaatgcataaaaagccttaa

SEQ ID NO: 44 - protein, 617 aa, Unknown
  Obtained from environmental sample
MDLALKNLTFAAPSYILMNRPQPVAIHPPKGGSLQRTPVIRRNSRLSAAAAVLSALAAFTLSAHATSMENIRLNQIGYYPNSRKVATVVMGDDKSVPSEFLVVGLPGGKPVFRGKLSAELFLWEESGESGFRADFSAVSAPGQYKLVILGNVPYKSESCPFAISDRAFKDVAVASMRAYYFQRCSYALSKKYAGKWARAAGHPDADVTYHPSSGHWEGEGKVTTPGGWYDAGDFGKYVVNSGITVGTLLAFYEQFPGYFPDKSLDIPESGSGRPDIIDEVKFNLDWMKTMQDVDGGVFFKVTTLSFPGYIMPEEDKGQRFVIGKSTTSSLNFAAAMAMAARVYAPFDSAYAKNCAERALLAWDWAQKNPNAAFRNPADVKTGEYKDAAFDDEFVWAAAELFITTKEKRFADFLKGKDVSYVGEPSWQNVRSLAALSLASVKNDLEPQRLEAVRKSITKTADKWLSEMDKHLYRMPNMKFIWGSNSSFANIGVGMIYAHIISGDEKYLLGAAEIADYLLGKNAVGISFVSAFGTKAMSNPHHRQSVAGKVGAIPGFLAGGPNAGQQDSAHGVTYSSKLPAKSYEDVYKSYASNEVAINWNAPAVFLFGAVDALMHKKP

SEQ ID NO: 45 - DNA, 3006 bp, Unknown
  Obtained from environmental sample
gtgttccgcttctttgacgaagacttcgtctcaggcggataccagtacgtctacccggacgagtccaaggtgtacattcccgaaaactccggtaagaacggcgaagtggcgttgcagtttgacttggccgccaacgactattcgggcggttccgtctgcctatacaatatgatgtacgaccttacaccctacatcgcctccggcgcgctgcagttttgggtaaagggcgccaacggcgccgagatcgcttgggcggcgctggtcgacgacgaaaacggcgacggcaagaagacagtcgtgcgcctcccgatgaacaactacggcggcatcacaaatgattggacgctcgtcagcatccccctcgtcgatttcggcaagcgcggcgtattctgggacgccaagaagcgcgtcgaggtgccggaaccgtttcaatgggacaaggtctgcgagttccgcatagagatcaagaagaacgagaacccctccttccgtatttgggtggacgacatctttatcgtcagcaacgtctttgaggccaaagtggtcgaagacgtcaagtattgggacgacaacgaagaggtgcttgatgatgttcctgtggcgaacaagcctgcggtcaaggagaccgacaagtttttagcgggcggcgaccctataggctttgcctacgtttacggcggcaagaccgctttcaaggtgcagaagacgaagtccggcgcgccggttttcgcgaactatatggacggcaacgaatactccggcgtcacgatttcactgggcgagggcaagttcgccaacctgacgaacgccaggactgctaaggcggcgggtatcgctttctggggtcgcggcggcgacggcgtgggcaacgtcggcgtaggtcttctggacaatcagggcaagaacagcgccggcgtggaggtcaaagttcagactaaggtgctcctcggcgacttcggcaagatcgagcccgtgtggaaatactatatgataccgatccgctctttcaggccggagggtttgtattgggacgacagcaagaacgccgaggtctccggcaaagtggattggacgaagatacaggaggtgcgcttctccgtaggcaagggcgagaataaggttccagagggcgaaccggtcaacttctatgtgaaggatatatcaattattgatgagattcccggttacgtgaatcctgacgactattggaacgccttcaagtccaacgctcctgagatcaagctgcacgatttggagactgagggcgaccaaaagtgggagacctcaaacgggcccaagtccgaggtctcgttcaagtactccgagtccggcgctcctagcggcggcaagtccgcgcttgaggtcacctacaggttgggcgactgggtggacgtgctcttcaactacaagaataacaaccgtcccgacgcgcagcgcgattggacgaagcattggggcctgaagttcgacttctacaccgacaagccctaccagcccataactgttcaggttcaggacaagggcaacgagatattcatagcgccggcgggcggcaacaagggatggacggaggtcatcgtgccgttcaagaacttctccaagttcccctactaccagccggaggacgcggtgcagaacggcaagttcgatctggacggcgtaatggtgctcgacttcaagcccgccggcgagggctcgcgcggcaccttcaaggtcgacaacgtcaggctgaccaacgacagggtggccaaggtgaaagaggacccggccaaggtggcggtaacgatcaccggcagcgacaaggagatcacgaagaagataaacagcggtctcttcggcatcaacgccgcgctgtgggacggcgacctgctgctcggccccacgaagaagttcgtgaaggatgtcaaccatcacgtcctgcgctatcccggcggtctgcgcgccgacgaggatcactgggaagaggtgctgaagaagaaggattggatggtagacatagacgagttcctgaaattctgcgaggagacgaacacgacgcctatgatcaccgtcaactacggcaccggcacgccggaggaggcggccaggtgggtgaaccacgtgaacaaggtcaaaaaggccaacgtgaagtattgggaaataggcaacgaactttacggcgactggcacgccaaccactgcacgcccgaggagtacggcaagcgcgccagagagttcgccaagcagatgaaagcggtcgatccgagcatagtcgtcacggcggtttggatgcttgagggcgattggaacaagaagagtttcgagctgctcaaggacgtggtagacggcgtgaacgttcaccactatccgcagggcaccggccaggagaacgacgccggtcttttggccgcgccgcagaccctgaacgagattctgcccggcgttcggaagcagctcgatcaatacggcgtctccggcaagaagtacgagatttggctgacggagtggaactcggtagactttaaaccgggcccccagacgttgggcattgtcaacgccctcttcgtggccgactatttggggatgctcacgcaccacaacatagatcaggcgtcgtactgggacatccacaatagcatcactcctgagggcggcgactacggctacctctcccgcaccggcgctcccgacggcgacaacgtgccgcgcccgtcgtactgggcgttcaagatggcgagccacagtttaggccgcgggtcgctccttgagtcgcataccggaaacgaccgagtctccagttactacacgctggacggcaagaggaagtcgctcatggtgatcaacaagcaccccaagagcgtggcggatctcacgatcaacatccccggcttccagggcaaggccaagaagcagctattgaacgtggataacgccaagaaggggccgacggaggaggctatagatgttaagccgggggtgaagttgtcgctaccggcgcactcggtggtcacgattacgctggagtag

SEQ ID NO: 46 - protein, 1001 aa, Unknown
  Obtained from environmental sample
MFRFFDEDFVSGGYQYVYPDESKVYIPENSGKNGEVALQFDLAANDYSGGSVCLYNMMYDLTPYIASGALQFWVKGANGAEIAWAALVDDENGDGKKTVVRLPMNNYGGITNDWTLVSIPLVDFGKRGVFWDAKKRVEVPEPFQWDKVCEFRIEIKKNENPSFRIWVDDIFIVSNVFEAKVVEDVKYWDDNEEVLDDVPVANKPAVKETDKFLAGGDPIGFAYVYGGKTAFKVQKTKSGAPVFANYMDGNEYSGVTISLGEGKFANLTNARTAKAAGIAFWGRGGDGVGNVGVGLLDNQGKNSAGVEVKVQTKVLLGDFGKIEPVWKYYMIPIRSFRPEGLYWDDSKNAEVSGKVDWTKIQEVRFSVGKGENKVPEGEPVNFYVKDISIIDEIPGYVNPDDYWNAFKSNAPEIKLHDLETEGDQKWETSNGPKSEVSFKYSESGAPSGGKSALEVTYRLGDWVDVLFNYKNNNRPDAQRDWTKHWGLKFDFYTDKPYQPITVQVQDKGNEIFIAPAGGNKGWTEVIVPFKNFSKFPYYQPEDAVQNGKFDLDGVMVLDFKPAGEGSRGTFKVDNVRLTNDRVAKVKEDPAKVAVTITGSDKEITKKINSGLFGINAALWDGDLLLGPTKKFVKDVNHHVLRYPGGLRADEDHWEEVLKKKDWMVDIDEFLKFCEETNTTPMITVNYGTGTPEEAARWVNHVNKVKKANVKYWEIGNELYGDWHANHCTPEEYGKRAREFAKQMKAVDPSIVVTAVWMLEGDWNKKSFELLKDVVDGVNVHHYPQGTGQENDAGLLAAPQTLNEILPGVRKQLDQYGVSGKKYEIWLTEWNSVDFKPGPQTLGIVNALFVADYLGMLTHHNIDQASYWDIHNSITPEGGDYGYLSRTGAPDGDNVPRPSYWAFKMASHSLGRGSLLESHTGNDRVSSYYTLDGKRKSLMVINKHPKSVADLTINIPGFQGKAKKQLLNVDNAKKGPTEEAIDVKPGVKLSLPAHSVVTITLE

SEQ ID NO: 47 - DNA, 1755 bp, Unknown
  Obtained from environmental sample
ttgcagaggacgtccgttatccgccgaatccgccggcctgtcgcggccgcggcctttctgtcagcgctggccgcgttcactttaagcgttcacgcgaccactatggaaaacatcaggctaaaccagatcggctactatccggagtcgcgtaaggtcgcgaccgttattatgggcgacgacaagagcgtgccgtcggagtttcttgtcgtcggggtgccgggcggcaagacggtcttcaggggcaaactgtccgccgaactttttttgtgggaggagtccggggaacgcggcttccgcgccgatttttccgcggtcagcgccccggggcagtataaacttgtgatcttgggggatgtgccgtacaagagcgaatcctacccgttcacgatatcagaccgggtgttcaaggacgtggcggccgcctctatgcgcacctactactttcagcgttgctcctacgcgctctccaagaagaacgccggcaagtgggcccgcgccgccgggcatcccgatttggacgtaacctaccacccgtcgagcgggcactgggagggggaggggaaggtcgcttcgccgggcgggtggtacgacgcgggggatttcggcaagtacgtcgtcaactccggtataacggtggggacgctactggccttctacgagcgctttcccgactacttccccgacaagagtttagacataccggagtcgggcggcgggcgtccggatattctcgacgaggtgaagtttaacttggattggatgaagacgatgcaggacgcagacgggggcgtcttcttcaaagtgaccaccctctcgttccccgggtacatcatgccggaggaggacaaggatcagaggttcgtcataggaaagagcacgtcgtcgtcgctgaacttcgccgccgcgatggcgatggcggggcgggtgtacgcgccgttcgacagcgtttacgcgagaaactgcgtggagcgggcgctctcggcgtgggattgggcggtgaagaaccccggcgcggtattcaagaatccggctgacgtcaagaccggcgagtacaaggacgcgaccttcgacgacgagttcatctgggcggcggcggaactcttcatcaccacgaaagagaaacgattcgccgatttcctgaaagggaaagatataacatacgccggagaaccgtcgtggcagaacgtccactcattggcggctctgtcgctcgccactgtcaagaacggtttggattcacagcgcttggaggccgtccgtaaatcgataacgaaaacggcggacaagtggctgtcggagatggacaagcacctatatagggtgccgaacatgaagttcatctggggctcgaactcaaacttcgccaacatgggcgtagggatgatctacgccaacatcatatcgggcgacgataagtatctcttcggcgcggctgagatcgccgattatctgttggggaaaaacgccgtgggaatttcgttcgtcagcgcattcggaaccaaggcgatgtcgaacccgcatcacaggcaaagcgtggcgggaaaagcgggcgctattccgggtttcttagcgggcggcccgaacgccggccaacaagacagcgcgcacggggtgacctattcgtcaaaattaccggcaaagagttacgaggatgtatacaagagttacgcttcaaatgaagtggcgataaattggaacgcgccggcggtgtttttattcggggcggtagacgcgttaatgcagggtaagaagtaa

SEQ ID NO: 48 - protein, 584 aa, Unknown
  Obtained from environmental sample
MQRTSVIRRIRRPVAAAAFLSALAAFTLSVHATTMENIRLNQIGYYPESRKVATVIMGDDKSVPSEFLVVGVPGGKTVFRGKLSAELFLWEESGERGFRADFSAVSAPGQYKLVILGDVPYKSESYPFTISDRVFKDVAAASMRTYYFQRCSYALSKKNAGKWARAAGHPDLDVTYHPSSGHWEGEGKVASPGGWYDAGDFGKYVVNSGITVGTLLAFYERFPDYFPDKSLDIPESGGGRPDILDEVKFNLDWMKTMQDADGGVFFKVTTLSFPGYIMPEEDKDQRFVIGKSTSSSLNFAAAMAMAGRVYAPFDSVYARNCVERALSAWDWAVKNPGAVFKNPADVKTGEYKDATFDDEFIWAAAELFITTKEKRFADFLKGKDITYAGEPSWQNVHSLAALSLATVKNGLDSQRLEAVRKSITKTADKWLSEMDKHLYRVPNMKFIWGSNSNFANMGVGMIYANIISGDDKYLFGAAEIADYLLGKNAVGISFVSAFGTKAMSNPHHRQSVAGKAGAIPGFLAGGPNAGQQDSAHGVTYSSKLPAKSYEDVYKSYASNEVAINWNAPAVFLFGAVDALMQGKK

SEQ ID NO: 49 - DNA, 1251 bp, Unknown
  Obtained from environmental sample
atgaagaagtttttcatatgcctgttgctgccggttttgctggcggtgtcttgtccttcgtcgcctgtttcgcagcagggtgggggcgtagatctttcttatgcccccaaaattcccgatacggaaaatgattatccattggaggcgatgagcggaaaaacagcctttgagtatttcagggatgaaaaacttctgctgggctggaatgtcgggaataccctagacgcgtataccaatgggcgggcaaacgaaacgggctggggcaaccccaggataaatcaggcgttatttgacggagtcaaaaaagccggttttgacattgtccgaatccctgtcacctggatgggctatatcggaccggcgccggatcaccatatcgatgaaaaatatctggcccgtatcgccgaagtggcgcagatggccaataaggccggccttaaggcgattatcaacctgcaccacgacggctcaaccgaaggcggcggcaaggacaacggctggctttcgattaacaaggcccgcgcgagcaaagaaggctataacgaggtgacccataaattcgcgcgggtttggaaacagatagcgacatattttaaaaattacggcgactggctgatctttgaatcgatgaacgaaatccatgacggcaactggggcaatggaagcgtacagggtacgcaggccgacattgtgaatgactggaaccggttttttacccagatcgtgcgggaaaccggcgccaataacgcggcccgttatgtggtaatacccggctactgcaccaagccccagcatacgctcgcaaattatttctggctgcccccggacagcgcccccgacaggcagattgtaacctttcattattacgatccttatgaatttggaatcgccgcgacacgttgggaatggggttcaaattctgataaagacagagtggtcagggattttgccccttttaagtcaaagtatattgacaacaaaatcccggtgatcatcggtgaggccggcgcggtgcggcagctctttccggaggataaggcaaaagaagacaaggcgcggcaaaaccggcttgattacctttcatgggtattcggcaaagccaaagaaaacggccttgttccaatttattgggacaacggggcggtgagcggcaatggcgagaaattcggcctttttacacgcgctacaggccagccgaattcaccggagagcgacgcctgcattaaggcgatggttaatgcggttaaatag

SEQ ID NO: 50 - protein, 416 aa, Unknown
  Obtained from environmental sample
MKKFFICLLLPVLLAVSCPSSPVSQQGGGVDLSYAPKIPDTENDYPLEAMSGKTAFEYFRDEKLLLGWNVGNTLDAYTNGRANETGWGNPRINQALFDGVKKAGFDIVRIPVTWMGYIGPAPDHHIDEKYLARIAEVAQMANKAGLKAIINLHHDGSTEGGGKDNGWLSINKARASKEGYNEVTHKFARVWKQIATYFKNYGDWLIFESMNEIHDGNWGNGSVQGTQADIVNDWNRFFTQIVRETGANNAARYVVIPGYCTKPQHTLANYFWLPPDSAPDRQIVTFHYYDPYEFGIAATRWEWGSNSDKDRVVRDFAPFKSKYIDNKIPVIIGEAGAVRQLFPEDKAKEDKARQNRLDYLSWVFGKAKENGLVPIYWDNGAVSGNGEKFGLFTRATGQPNSPESDACIKAMVNAVK

SEQ ID NO: 51 - DNA, 1740 bp, Unknown
  Obtained from environmental sample
atgaaccggatcgctttcctcgcgctcgtcgcctgctgcatgccgtggagtgcccagtcgtccgaagccgggtctccgggggcggcgcccatccatctcgaccagctgggtttcctgccgggatcgcacaagctcgcggtggtcggacggccggcgggatccgcggcggccgcctctgccttcagcgtcgaggatgcgcgagggcgcgtcgtcctgcgcgggacgctgtcgccgccgctcgaatgggcgccggcaggacaggcggcgcaggtggccgacctcagcgccctggacaagcccggccgctaccgggtgcgggtcgagggcctgcctccgtccgatccgttcccggtggcggcggaggcctacgtgccgctcgcccgggccgcgttgaaggccttctatttcaatcgcgccagcaccgatcttccgcagcgctacgtagggcgtttcgcgcgcgctgcaggccatcccgataccgacgtgcggatacacgcgtccgcggcctcggcggcgcggcccgagggcagttccatctccgcgcccaagggctggtacgacgccggcgactacaacaagtacgtggtcaattcgggcatcagcacctatacgctgctggccgcccacgaacactatccgcagttcttccggacgctcgaggcgggcatcccggacgaggcgccgggcgtgcccgacatcctgcaggaggcgtggtggaacctgcagtggatgctggcgatgcaggacccggccgatggcggggtgtaccacaagctgaccacgctgcggttcgagggcaacgtgatgcccgagcaggcgcgcgcgcagcgctacgtggtgatgaaaggcaccgcggccacgctcgatttcgccgcggtgatggccgccgcgagccggatctacgccccgttcgagaagcaatacccgggccaggccgcgcgcatgctggacgccgcacgcaaggcctgggcctgggcgcagcggcaccccgacacggtctacaggcagccgccggacgtgcataccggcggctacgacgatgccgagctggacgacgaattcgcctgggccgcggccgagctgtacgtcgccacgggcgaggacggtttctacgatgcgttcgccgcgcgcgacgtgccggccagcgtgccgtcgtggggcaacgtcgccgggctggcgtggacgacgctggcgcagcatcgcgagcggctgacggcacgcgccgatcgcgaacgcatcgtccgtgaggtcgacgggctggccgcgagattgtccgcgcggtggcggcagtcgccgtggcggatcgcgatgagcgaggacgacttccgctggggcagcaacgcgatcgcgctgaaccaggcgatgatgctgttgcagggctaccggctatccggccagcgcgattacctggatgcggcgcagtcgcagctcgactacgtgctggggcgcaatccgctgggcctgtcgttcgtcaccggcatcggcctgcgctcgccgatgcacatccatcatcgcgtttccgaggccgacggcatcgccgatcctgtcccgggctggttggccggcgggccgcagccggggcaacaggacgcggcgggctgcaaggcggcctatccgtccagcctgccggcgctgtcgtacctggacgacgcgtgcagctatgccagcaacgaggtggcgatcaactggaacgcgccgttggtgtacgtcagcacggcgatccaggtgttgacgcgttga

SEQ ID NO: 52 - protein, 579 aa, Unknown
  Obtained from environmental sample
MNRIAFLALVACCMPWSAQSSEAGSPGAAPIHLDQLGFLPGSHKLAVVGRPAGSAAAASAFSVEDARGRVVLRGTLSPPLEWAPAGQAAQVADLSALDKPGRYRVRVEGLPPSDPFPVAAEAYVPLARAALKAFYFNRASTDLPQRYVGRFARAAGHPDTDVRIHASAASAARPEGSSISAPKGWYDAGDYNKYVVNSGISTYTLLAAHEHYPQFFRTLEAGIPDEAPGVPDILQEAWWNLQWMLAMQDPADGGVYHKLTTLRFEGNVMPEQARAQRYVVMKGTAATLDFAAVMAAASRIYAPFEKQYPGQAARMLDAARKAWAWAQRHPDTVYRQPPDVHTGGYDDAELDDEFAWAAAELYVATGEDGFYDAFAARDVPASVPSWGNVAGLAWTTLAQHRERLTARADRERIVREVDGLAARLSARWRQSPWRIAMSEDDFRWGSNAIALNQAMMLLQGYRLSGQRDYLDAAQSQLDYVLGRNPLGLSFVTGIGLRSPMHIHHRVSEADGIADPVPGWLAGGPQPGQQDAAGCKAAYPSSLPALSYLDDACSYASNEVAINWNAPLVYVSTAIQVLTR

SEQ ID NO: 53 - DNA, 1227 bp, Unknown
  Obtained from environmental sample
atgaaaaagttattcgggttatcaggtattatcactattgccgctattataggattttcaatcgcggcttgtaacagtaataaaagtcttggtaatggtgatggtaatggtgatggtaatgattatgtttttgattttgattttaaatatccgcctgctcctaaagggccgtccgcgcctgagccattcaatgacattaccgccgcgcaattagtggcaaatatcaaagtcggctggaatttgggtaacacgcttgacacgcacaatgttacctggcacggtccgaatccaactgtttctcagtttgaaacagcatggagaaacccggttactaccaaaacgcatatcacggcaataaaaaacgcgggctttaacgcgattagaattcccgtttcgtggacaaaatgcgccgactctaaatacaacatccgcgcggactggatggagagagttaccgaagtggtcaattacgcggttgataacgatatgtatattgtgcttaacacccaccatgatgaggacgtatttaaattcacaaacgataaaaaagccgcgtcaataaacgcgttcaaaaaaatatggggacagattgcctgtaattttcaaaattacaacgagaaacttatttttgaaggtttaaatgagccaagaacaatcggcagcgcggctgaatggaacggcggaaccgccagtgaacgcgccaacctgaatgaacattataaagctttcgtagaaacagtacgcgcttgcggcgggaataacgacaagcgttttctggtactcaatacctatgccgcttcaagtgataaagcggcgatggagagcttaactatcccggcagacaccgcgcaaaacaagattatcgcatcttaccacgcttatgagccataccattttgctatgaacacaggtaatggttcggtaaaaacatggagtcagagtaattcatcagacacttctcctattacaagccggattaatcaagcaaaatctacttttatcgacaagggcatacctgtcataatcggcgaattcggcgcccttaataaagacaatgaaccggcaagggccgagtgggttgaattttacgtgaagtcagccttacaaaggggtattaaatgcttctggtgggatgacggcggtgattttaaattatacaacaggagaggaaatacatttttttatccgcaaataagagacgggttaatacggggcgcgggtaactaa

SEQ ID NO: 54 - protein, 408 aa, Unknown
  Obtained from environmental sample
MKKLFGLSGIITIAAIIGFSIAACNSNKSLGNGDGNGDGNDYVFDFDFKYPPAPKGPSAPEPFNDITAAQLVANIKVGWNLGNTLDTHNVTWHGPNPTVSQFETAWRNPVTTKTHITAIKNAGFNAIRIPVSWTKCADSKYNIRADWMERVTEVVNYAVDNDMYIVLNTHHDEDVFKFTNDKKAASINAFKKIWGQIACNFQNYNEKLIFEGLNEPRTIGSAAEWNGGTASERANLNEHYKAFVETVRACGGNNDKRFLVLNTYAASSDKAAMESLTIPADTAQNKIIASYHAYEPYHFAMNTGNGSVKTWSQSNSSDTSPITSRINQAKSTFIDKGIPVIIGEFGALNKDNEPARAEWVEFYVKSALQRGIKCFWWDDGGDFKLYNRRGNTFFYPQIRDGLIRGAGN

SEQ ID NO: 55 - DNA, 1203 bp, Unknown
  Obtained from environmental sample
atgatactattgaaaaaggaggcgtttatgaggaagttattcgggtcttcaggtattatcactattgccgctattataggattttcaatcgcggcttgcggtgatgattataattatactgctattccgaaaactccgcctgagcctgagccattcgatgatattactgccgtagaattagtgaaacgcatcaaagtaggctggaacttgggcaacacgcttgacacaaatggcggtaatccgagcggaactgtttcttaccatgaaacattatgggggaaccctgttactacaaaagcgcatatcacggcaataaaaaacacgggctttaacgcgattagaattcctgtttcctggacaaaatgcgccgatgccaacaatgattacaaaattcgcgcggactggatggcgagggttaccgaaatagtcaattacgcggctgacaacgatatgtatattgtgcttaacacccaccatgatgagagagtttttaaatttacaaacgataaaaaagccgcgtcaataaacgcgttcagtaaaatatggggacaaatcgcggataattttcaaaattacaacgagaaacttatttttgaaggattaaacgaaccaagaacaataggcagttcggccgaatggaacggcggaaccgacgaagaacacgccaacctgaatgaacattataaagtttttatagaaacggtgcgggcttcaggcggcaataacgacaagcgttttctggtactcaatacctatgccgcttccggcgtggcaacggcgatgaacggcttaacaatcccggaagataccgcgcaaaacaaaattatcgcgtcttaccacgcttatgagccgttcaattttgctaataacaataagcctgttggaacagaaggttcagtaaatacctggaatcagaataactcaaacgataccaggcctattaccagcaggattgatcgggcttataatttatttgtcaataagggcatacctgtcataatcggtgaattcggcgcttatgataaaaacaatgaaccggcaagagccgcgtgggttgaattctacgtgaaatccgccgcggaaaaaggcattaagtgtttctggtgggatgacgggggtaattttaaattattcaacaggggaaacaatacattttattttccgaaaataaaagacgggttaataaagggcgcgggcggctga

SEQ ID NO: 56 - protein, 400 aa, Unknown
  Obtained from environmental sample
MILLKKEAFMRKLFGSSGIITIAAIIGFSIAACGDDYNYTAIPKTPPEPEPFDDITAVELVKRIKVGWNLGNTLDTNGGNPSGTVSYHETLWGNPVTTKAHITAIKNTGFNAIRIPVSWTKCADANNDYKIRADWMARVTEIVNYAADNDMYIVLNTHHDERVFKFTNDKKAASINAFSKIWGQIADNFQNYNEKLIFEGLNEPRTIGSSAEWNGGTDEEHANLNEHYKVFIETVRASGGNNDKRFLVLNTYAASGVATAMNGLTIPEDTAQNKIIASYHAYEPFNFANNNKPVGTEGSVNTWNQNNSNDTRPITSRIDRAYNLFVNKGIPVIIGEFGAYDKNNEPARAAWVEFYVKSAAEKGIKCFWWDDGGNFKLFNRGNNTFYFPKIKDGLIKGAGG

SEQ ID NO: 57 - DNA, 1755 bp, Unknown
  Obtained from environmental sample
ttgcagaggacgtccgttatccgccgaatccgccggcctgccggggccgcgagctttttgtttgcgttggcaacgttctcaatgagcgctcgcgcgaccactatggaaaatatcaggctgaatcagattggttactatccggaggccaataaggtcgcgaccgtggtcatgggcgacgacaagagcgtgccgtcggagtttcttgtggtcggtttgccggacggtaagacggtttttaggggcaagctgtccgcggagctttttttgtgggaggagtccggggagcgcggcttccgcgccgacttttccgcggtcagcgccccggggcggtacaagctcgtgattttgggcgatgtgccgtacaagagcgagtcctatccgttcgcgatttccgaccgcgcgttcaaggacgcggcggccgccgctatgcgcgcgtactactttcagcgctgctcatacgcgctcgccaagaagcacgccggcaagtgggcgcgcgccgccggacatcccgacacggacgtcgcctatcacccgtcaagcgggcattgggagggcgagggaaaggttacctcgccgggcggctggtacgacgccggggacttcggcaagtacatcgtcaactccggcataacggtggggacgctcttggctttctacgagcttttcccagattacttccccgacaagagcttggacatacccgagtcgggaagcgggcgccccgacattctcgacgaggtgaagtttaatctggactggatgaagactatgcaggacgtagacgggggcgtgttctttaaactgaccacgctcactttccccgggtacgtcatgccggaggaggacaagggccagcggttcgtcataggcaagagcacgacgtcggcgctggactttgccgcggctatggcggcggcggcgcgggtgtacgcgcctttcgacagcgtctacgcgaagaactgcgcggagcgggcgctcttggcttgggattgggcggagaggaatcccggcgccgcgttcaaaaatccggcggacgtcaagaccggcgagtacaaggacgcgtctttcgacgacgagtttatttgggcggcggcggagctgttcatcaccacaaaagagaagcgcttcgccgatttccttaaaggcaaggatatttcttacgccggcgagccgtcgtggcagaacgtccgctcgcttgcggcgctgtcgctcgcgtccgtcaagaacggcttggaggcgcagcgcttggacgctatccgaaaatcaataacaaagacggccgacaaatggctgtcggagatggacaagcacctgtacagggtgccgaacatgaagttcgtttggggctcaaactcaagtttcgccaacatgggcgtggggatgctctacgcgcacatcatatcgggcgacgacaagtacctattgggcgcctccgagattgccgattatctgttggggaagaacgccgtgggaatctcatttgtcagcgccttcggaacaaaggcggtgtcgaacccgcaccacaggcaaagcgtcgcgggaaaggcggggccaattccgggatttctggcgggcgggccaaacgccggtcaacaagacggggccaacggggtaacctacacgtcaaagctgccggcgaagagttacgaggatgtttacaagagttacgcctcaaacgaggtggcaatcaactggaacgccccggcggtatttttattcggggcgatagacgcgttgatgcggaataagaggtag

SEQ ID NO: 58 - protein, 584 aa, Unknown
  Obtained from environmental sample
MQRTSVIRRIRRPAGAASFLFALATFSMSARATTMENIRLNQIGYYPEANKVATVVMGDDKSVPSEFLVVGLPDGKTVFRGKLSAELFLWEESGERGFRADFSAVSAPGRYKLVILGDVPYKSESYPFAISDRAFKDAAAAAMRAYYFQRCSYALAKKHAGKWARAAGHPDTDVAYHPSSGHWEGEGKVTSPGGWYDAGDFGKYIVNSGITVGTLLAFYELFPDYFPDKSLDIPESGSGRPDILDEVKFNLDWMKTMQDVDGGVFFKLTTLTFPGYVMPEEDKGQRFVIGKSTTSALDFAAAMAAAARVYAPFDSVYAKNCAERALLAWDWAERNPGAAFKNPADVKTGEYKDASFDDEFIWAAAELFITTKEKRFADFLKGKDISYAGEPSWQNVRSLAALSLASVKNGLEAQRLDAIRKSITKTADKWLSEMDKHLYRVPNMKFVWGSNSSFANMGVGMLYAHIISGDDKYLLGASEIADYLLGKNAVGISFVSAFGTKAVSNPHHRQSVAGKAGPIPGFLAGGPNAGQQDGANGVTYTSKLPAKSYEDVYKSYASNEVAINWNAPAVFLFGAIDALMRNKR

SEQ ID NO: 59 - DNA, 1176 bp, Unknown
  Obtained from environmental sample
atgaagaagatgttctttgcggttgcgatgttagttatgttttttgccgtcggcgcttacgcgcagaacggcgtaaccacccgttattgggacgcttgcaagccgagttgcggatggaccggcaatgcttccggtagccccaacggagtttgcaaaagttgcaatgtcagcggcgcggtggaatccaataacgacgcacgcagcgcgtgcgacaacggcggcaccgcttacacgtgtatgaagcaggctccgtgggcgattgacgacaatatgtcatacggttttgtcgccaacaataaagtcggctgcggcaagtgtgtggagtttacgtttaccaataccgctatcagcggtaagaaaatgacggttatggtgagcaacttcggcaatttaggcggggacgcccactttgacattatgattccgggcggcggcgtgggcgacttcgacgccctgagcaggcagattcagcagaacggcggttccagcgcggacttaggcgtgaggtacggcggttttaggggtaagtgcggcgccgatgcgaattgcataaggaatatgtgcaaaaccgctttcggcacggatgcgcttgcggatctgagggcgggttgcgaatggtacatagactggttcaagatggccgataatcccggcgttaactataaggaagttacttgcccgcaggcgttgatagacaagtacaagggcaatttcagcaataatcccaccccgcccgtcggcagcacctacacgctcacggtcaaccgtaacccggcaaacggcggcaccaccaacccggcgagcagccaggcgaacatcaacggcgggtcgcaggtcaacatatcggccacgccggcgagcggctacacgtttgccaactggacggtatccggcagcggcacaatcgccaacgcgggcagcgcctccacgaccgtcaccgtgaacgggaacatcaccgtcacggccaacttcagcagcggcggcacaacccccacgccggtgagaggggacacaatcaaggtggaagcggagaattacgcgagcaaagtcggcgacggcatgcgggttgaagccggcgccatcggttatatcgaaaacgggtactccgcgacctacaacgtaaccgccggcaaggcgggggcggccaccatgcagttccggatcgccactcgtgcc

SEQ ID NO: 60 - protein, 392 aa, Unknown
  Obtained from environmental sample
MKKMFFAVAMLVMFFAVGAYAQNGVTTRYWDACKPSCGWTGNASGSPNGVCKSCNVSGAVESNNDARSACDNGGTAYTCMKQAPWAIDDNMSYGFVANNKVGCGKCVEFTFTNTAISGKKMTVMVSNFGNLGGDAHFDIMIPGGGVGDFDALSRQIQQNGGSSADLGVRYGGFRGKCGADANCIRNMCKTAFGTDALADLRAGCEWYIDWFKMADNPGVNYKEVTCPQALIDKYKGNFSNNPTPPVGSTYTLTVNRNPANGGTTNPASSQANINGGSQVNISATPASGYTFANWTVSGSGTIANAGSASTTVTVNGNITVTANFSSGGTTPTPVRGDTIKVEAENYASKVGDGMRVEAGAIGYIENGYSATYNVTAGKAGAATMQFRIATRA

SEQ ID NO: 61 - DNA, 1749 bp, Unknown
  Obtained from environmental sample
ttgcagaagacgcccgttatccaaccaatccgccgcccggccaccgccgcgctcgtcttggcggcggcgctggccgtgagcgcccgcgctaccactatggagaacatcaggctgaaccaaatcggctactacccggagtcgcgcaaggtcgcgacggtggtcatgagcgacgacaagagcgtaccgtcggagtttctcgtcgtgggcgtgccggacggcaaggcggtcttcaagggcaagctctccgccgagcttttccgctgggaggagtccggcgagtgcggcttccgcgccgacttttcggcggtcagcgccccggggcggtacaagctcgtgattctgggcgacgtgccgtacaagagcgaatcctacccgttcgcggtctcgggccgcgctttcaaagacgccgcaaccgccgcgatgaaggcctactacttccagcgctgctcctacgccctctccaaaaagtacgcgggcaagtgggcgcgcgccgccggccacccggattcggacgtcacctaccacccgtcgagcggccactgggagggcgaggggaaggtaacctcgcccggcggctggtacgacgccggggacttcggcaagtacgtcgtaaactcgggaatcaccgtggggacgctcctggcgttctacgagcgcttccccgactacttccccgacaagagtttggatataccggaatcgggcagcgggcgcccagacatcctcgacgaggtgaagtttaatctggattggatgaagaccatgcaggatatagacggcggcgtgttcttcaagctgaccacgctgacgtttccggggtacgtcatgccggaggaggacaagggtcagaggtttgtgatagggaagagcgcgtcgtcgtcgctgaacttcgcggcggcgatggctatggcggcgcgggtgtacgcgcccttcgacagcgcctacgcgaagaactgcgcggagcgggcgctgttggcgtgggattgggcgcagaggaacccgtacgccgcgttcaagaacccggcggatgtcaagacaggcgagtacaaggacacgactttcgacgacgagtttgtctgggcggcggcggagctttttatcacaacgaaagagaagcgttttgaagatttcctgaaaggcaaggatataaattactccggcgagccgtcgtggcaaaatgtccgcccgcttgcggcgctctcgctcgcgtccgtcaagaacggcttagagccgcaacgtttgagcgccgtccgcaagtcgataacaaaaacggccgacaagtggttatcggagatggacaagcacttatacagagtgccgaacatgaagttcatctggggctcaaactcaaatttcgccaacatgggcattgggatgatctacgcgcacatcatatccggcgacgataaatatctcttaggcgcggcggagatcgcagattatctattgggtaagaacgcggtgggaatttcgtttgtcagcgctttcgggacaaaggcgatgtcgaacccgcaccacaggcaaagcgtggcgggaaaggtcggggcggttccggggttcttggcgggcggccccaatgccggccagcaagacagttcccacggcgtgacatactcgtcaaagttcccggcgaagagttacgaagacgtttacaagagctacgcctcaaacgaggtggcgataaactggaacgccccggcggtatttttgtttggggcggtagacgcgttgatgcagtctaaaaagtag

SEQ ID NO: 62 - protein, 582 aa, Unknown
  Obtained from environmental sample
MQKTPVIQPIRRPATAALVLAAALAVSARATTMENIRLNQIGYYPESRKVATVVMSDDKSVPSEFLVVGVPDGKAVFKGKLSAELFRWEESGECGFRADFSAVSAPGRYKLVILGDVPYKSESYPFAVSGRAFKDAATAAMKAYYFQRCSYALSKKYAGKWARAAGHPDSDVTYHPSSGHWEGEGKVTSPGGWYDAGDFGKYVVNSGITVGTLLAFYERFPDYFPDKSLDIPESGSGRPDILDEVKFNLDWMKTMQDIDGGVFFKLTTLTFPGYVMPEEDKGQRFVIGKSASSSLNFAAAMAMAARVYAPFDSAYAKNCAERALLAWDWAQRNPYAAFKNPADVKTGEYKDTTFDDEFVWAAAELFITTKEKRFEDFLKGKDINYSGEPSWQNVRPLAALSLASVKNGLEPQRLSAVRKSITKTADKWLSEMDKHLYRVPNMKFIWGSNSNFANMGIGMIYAHIISGDDKYLLGAAEIADYLLGKNAVGISFVSAFGTKAMSNPHHRQSVAGKVGAVPGFLAGGPNAGQQDSSHGVTYSSKFPAKSYEDVYKSYASNEVAINWNAPAVFLFGAVDALMQSKK

SEQ ID NO: 63 - DNA, 1755 bp, Unknown
  Obtained from environmental sample
ttgccgaagacgcccgttatccgccggattcgccgccatgttgcggttgcggcttttttgtccgcgttggcggcgttcgccgcgagcgctcgcgctactactatggaaaacatcaggctgaaccagctcggctactacccggaatctcgcaaggtcgcgaccgtcgttgtcggcgacgacaagagcgtgccgtcggagtttcttgtcgtcggtctgccgggcgataagacggttttcaggggcaagctctccgcggagcttttcttgtgggaggagtccggcgaacgcggcttccgcgccgacttttcggcggtcggcgccccggggcagtacaagctcgtgatcttgggcgacgtgccgtacaagagcgagtcctacccgttcgcgatttccgaccgggcgttcaaggacgtcgcggccgccgctatgcgtacctactattttcagcgctgctcctacgcgctctccaagaagcacgcgggcaagtgggcgcgcgccgcagggcatcccgatttggacgtcacataccacccgtcgagcgggcattgggagggcgaggggaaggtgacgtcgccgggcggctggtacgacgccggggacttcggcaagtacgtcgtcaactccggcataacggtggggacgctcttggccttctacgagcttttccccggctacttccccgacaaaagcttggacataccggagtcgggcagcgggcgccccgatattctcgacgaggttaagtttaacttggattggatgaagaccatgcaggatatcgacggcggcgtcttcttcaaagtgaccacgctctcgttccccggatacgtcatgccggaggaggacaaggggcagaggttcgtcataggcaagagcgcgacgtcgtcgctgaacttcgccgcggctatggctatggcggcgcgggcgtacgcgccgttcgacagcgcctacgcgaaaaactgcgccgagagggcgctcttggcttgggattgggcggtgaagaacccgaatgccgtgttcaaaaatcctgccgatgtaaagaccggcgagtacaaagacgcgaattttgacgatgaattcatctgggcggcggcggagcttttcatcacaacgaaagagaagcgtttcgccgacttcctgaaggacaaggatatttcatacgccggggaaccgtcgtggcagaatgtccgctctttggcgtcgctctcgctcgcgtccgtcaagaacggcttggaggcgcagcgtttggaggctgtccgcaaatcgataacaaagacggccgacaagtggctggcggagatggacaagcacttgtaccggatgccgaacatgaagttcgtttggggttcgaactcaagtttcgccaacatgggcgtcgggatgatttacgcgcacatcatatccggcgacgataaatatctcttgggcgcggttgaaatagccgattatctgttggggaaaaacgcggtgggaatatcgttcgtcagcgccttcgggacaaaggcgatgtcgaacccgcaccacaggcaaagcgttgcgggaaaagcggggcctattcccggcttccttgcgggcggcccgaacgccggtcagcaggacagcgcccacggggtaacctattcgtcaaaattgccggcgaagagttacgaggacgtttacaagagctacgcctcaaacgaggtggcaataaattggaacgcccctgcggtatttttgtttggggcgatagacgcgttgatgcagtctaagaagtag

SEQ ID NO: 64 - protein, 584 aa, Unknown
  Obtained from environmental sample
MPKTPVIRRIRRHVAVAAFLSALAAFAASARATTMENIRLNQLGYYPESRKVATVVVGDDKSVPSEFLVVGLPGDKTVFRGKLSAELFLWEESGERGFRADFSAVGAPGQYKLVILGDVPYKSESYPFAISDRAFKDVAAAAMRTYYFQRCSYALSKKHAGKWARAAGHPDLDVTYHPSSGHWEGEGKVTSPGGWYDAGDFGKYVVNSGITVGTLLAFYELFPGYFPDKSLDIPESGSGRPDILDEVKFNLDWMKTMQDIDGGVFFKVTTLSFPGYVMPEEDKGQRFVIGKSATSSLNFAAAMAMAARAYAPFDSAYAKNCAERALLAWDWAVKNPNAVFKNPADVKTGEYKDANFDDEFIWAAAELFITTKEKRFADFLKDKDISYAGEPSWQNVRSLASLSLASVKNGLEAQRLEAVRKSITKTADKWLAEMDKHLYRMPNMKFVWGSNSSFANMGVGMIYAHIISGDDKYLLGAVEIADYLLGKNAVGISFVSAFGTKAMSNPHHRQSVAGKAGPIPGFLAGGPNAGQQDSAHGVTYSSKLPAKSYEDVYKSYASNEVAINWNAPAVFLFGAIDALMQSKK

SEQ ID NO: 65 - DNA, 1245 bp, Unknown
  Obtained from environmental sample
atgtacagatattctcttacttttttatttcttctttcttctttttttgttttggcaatgtcctgtccttcatcgcctgtttcgcagcaacaggggagcgttaatctttcttatgtccctaaaatccgcgattcggaaagtgattataaaaaggaggcaatgtctgaaaaatcggctctccagttcttcagggatgaaaatttgcgggcgggtttgaatataggaaacagtctcgacgcttttaccaacggcagggccaatgagaccggctggggcaatccactgataaaccagcaattgcttgacggggttaaggcggcgggttttgatcttgtacgaatccctgtcacctggatgggctggataggacccgcgcccgatcaccatattgcggagacgtaccttgaacgcgtcgcggatgtcgtacagatggccaataaggccgggcttaaggttatcatcaacctgcaccacgacggcgctcacgacgcgggctggctttcgattaaaaaggcgaacgcaagcaaagaaggctacaatgaggtgacccatcaatttgtccgggtgtggaagcagatagcggagtatttcaaaaattatggcgactggctgatttttgaatccatgaacgagattcacgacggcaactggggcagcggaaacgtatggccgcaaaccaacattttaaatgactggaaccggttttttacccaggttgtgcggaatacgggcgccaataacaaaagccgttatttggttctgcccggctacagtaccaatatccggcacactctggcggattatttcgtgctgccccaggacagcgcccccgacaagctgattgtaacctttcattattatgatccttatgaatttgggatagcaggtacgcgctgggagtggggttcggaggcggataaaaacaaggtggccaatgattttgcacccttcaagccaaagtttattgacaggaatattccggtaatcatcggcgaatgcggcgcggtgcggcaggtttatcctaatgacaaggaaaaagaagacaagacgcggcagaacaggcttgattacctttcctgggtatttggcaaagccaaagaaaacggccttgttcccatttattgggacaacggggcgacaagcggaaacggcgagaaattcggcctttttacccggcgtaacggtcagccgaattcagcggaaagcgaggcctgcattaaggcgatgatggaagcggtaaaataa

SEQ ID NO: 66 - protein, 414 aa, Unknown
  Obtained from environmental sample
MYRYSLTFLFLLSSFFVLAMSCPSSPVSQQQGSVNLSYVPKIRDSESDYKKEAMSEKSALQFFRDENLRAGLNIGNSLDAFTNGRANETGWGNPLINQQLLDGVKAAGFDLVRIPVTWMGWIGPAPDHHIAETYLERVADVVQMANKAGLKVIINLHHDGAHDAGWLSIKKANASKEGYNEVTHQFVRVWKQIAEYFKNYGDWLIFESMNEIHDGNWGSGNVWPQTNILNDWNRFFTQVVRNTGANNKSRYLVLPGYSTNIRHTLADYFVLPQDSAPDKLIVTFHYYDPYEFGIAGTRWEWGSEADKNKVANDFAPFKPKFIDRNIPVIIGECGAVRQVYPNDKEKEDKTRQNRLDYLSWVFGKAKENGLVPIYWDNGATSGNGEKFGLFTRRNGQPNSAESEACIKAMMEAVK

SEQ ID NO: 67 - DNA, 1029 bp, Unknown
  Obtained from environmental sample
atgtcaaaaaaacacagcaaccatgtaaacgctcgttcgtttttatcgacggcagccatgatactcatcggcgcaacgcttttcggcgcaaacgcggacggtatgcgaaatatcaccacaatggcgcttgtcaaggatatgggtcttgggattaatttgggaaatactatggaggcaagaatagtctgcgacccgggtgacaacggttgtgaaaactgggtaaacggtttggcgacgctggaaacgtcttggggcagcccggaaatcaccgacgcgatagtaaaggggtatgccggcgccggattcaagacattgcgcgttccggtcgcgtggtcaaacagaatgaccggcgataacgccggcggaagttatacaatagacgccgcgctgatgaacagggttgagcaaatcgtaaattacgcgctcaataacggcatgtacgcaatcgtcaacatccactgggacggcgggtggtgggaaaagtttcccaccgattccgccgagtgcatgaaaaagtatacccgtatttgggctcaaataagcgaacgttttaagaattacggcgactatctcatgttcgagtccctgaatgaggaaggtgtgtggcaaagcgtgtggaatcagtacgacaactctgggaataaggcgagggcgtacgggttgttgaacgctataaatcagacatttgtcgaccttgtccgcgcctccggcggcaacaacggggagcgccatctgcttatcgccgggtacgcgacaaacatagaccgcacctgcgacgcggcgttcaaaatgcctgccgacccgaaaaaccgttgcgcggtgtccgtgcactactacgacccgttcgggtttacccatatagacagagacggcgattggacgccgtatctcgccacatggggaacgcaagcagacatagacgccttggataacgaaatgaacaaaatgaaaacagcctttgtggataaggggattccagtcatcatcggcgagtacggtttcgcgtccaaattgaacgagggctcgtgc

SEQ ID NO: 68 - protein, 343 aa, Unknown
  Obtained from environmental sample
MSKKHSNHVNARSFLSTAAMILIGATLFGANADGMRNITTMALVKDMGLGINLGNTMEARIVCDPGDNGCENWVNGLATLETSWGSPEITDAIVKGYAGAGFKTLRVPVAWSNRMTGDNAGGSYTIDAALMNRVEQIVNYALNNGMYAIVNIHWDGGWWEKFPTDSAECMKKYTRIWAQISERFKNYGDYLMFESLNEEGVWQSVWNQYDNSGNKARAYGLLNAINQTFVDLVRASGGNNGERHLLIAGYATNIDRTCDAAFKMPADPKNRCAVSVHYYDPFGFTHIDRDGDWTPYLATWGTQADIDALDNEMNKMKTAFVDKGIPVIIGEYGFASKLNEGSC

SEQ ID NO: 69 - DNA, 1059 bp, Unknown
  Obtained from environmental sample
aaagaattcggcacgagggggggctggctcagccagattgacgctatacaggaaaaaaaccccgataaatttcccggaatagacaaacacatggaaacttttatcctgccgaaggactttgccaatgttaaaagatggggtttcgatcatgtgcgagtcccgattgactcgtacctgttttttaccgaagatgacgctccgattgaaaacaggcttgcatatattgaccgcgccgtagagtacgctctgcccgccggcctcaggctgatattggatctccacgagtgtccggggcacgatttttcagaagccgcgaaaacccccgttcagaaacttttttcagacgacgacacctatataaagaagaccgaaaaaatctgggcctgccttgccgagcgttattcgcagaaagactacgtcctttttgagacgcttaacgaacctgtcgcccccaacgcggaaatctggaacaatgtcaaggacaggctctgccgcgaaatacgcctccacgctccctggtcgacgattatcaccggttccaatatgtggaactggccgagtacgtttgacagcctcacgccctttgacgatgacaacatgatctacagcgtgcattattatgaaccgctgctattcacgcaccagaacgcgccatggatcggtaatcctgaaatcaagacggcaaggccgtatccaggcgattacggtcccggttttatccgcaaatacggcatgacgctgtcagccggcgtctgggacagggagcggcttgccagggaattcgagcccgttaacgcattcaggaaaaagtacaatgcgcgcattatctgtaacgagttcggcgtttacacgcccgtcgagcttcaatcgcagctgcgctggtatgatgatctgctctcaatactcatggagatggggatcggtttttcgtactggaactataaaaatctggacttcggaataatttccataggggagaagctgcatgaaagtcttccgcagtatgacaatcccgaacggataaatcacccggttcttgatgtgttaaagaagtattaa

SEQ ID NO: 70 - protein, 352 aa, Unknown
  Obtained from environmental sample
  DOMAIN (18)...(322): Cellulase (glycosyl hydrolase family 5)
KEFGTRGGWLSQIDAIQEKNPDKFPGIDKHMETFILPKDFANVKRWGFDHVRVPIDSYLFFTEDDAPIENRLAYIDRAVEYALPAGLRLILDLHECPGHDFSEAAKTPVQKLFSDDDTYIKKTEKIWACLAERYSQKDYVLFETLNEPVAPNAEIWNNVKDRLCREIRLHAPWSTIITGSNMWNWPSTFDSLTPFDDDNMIYSVHYYEPLLFTHQNAPWIGNPEIKTARPYPGDYGPGFIRKYGMTLSAGVWDRERLAREFEPVNAFRKKYNARIICNEFGVYTPVELQSQLRWYDDLLSILMEMGIGFSYWNYKNLDFGIISIGEKLHESLPQYDNPERINHPVLDVLKKY

SEQ ID NO: 71 - DNA, 1410 bp, Unknown
  Obtained from environmental sample
atgaagaagatgttctttgcggtcgcgttgtgcgttgtgttcttagccgtcggcgcgcacgcgcagcagaacggcgtaaccacccgctattgggacgcttgcaagccgagctgcggatggacgggcaacgccggcggcagccccaacggggtttgcaaaagctgcaatatcaccgggggggttgagtcaagcaacgactcccgaagcgcgtgcgagaacggacccgcgttcacgtgcatgaagcaggctccgtgggcgattgacgagaacatgtcgtacggctttgtcgccaacaataaagtcggctgcggcaagtgcgtggagtttacgttcaacaacacggccgtcagcggcaagaaaatgacggtcatggtcagcaacttcggcaacttgggcggggacgcccacttcgacatcatgatacctggcggcggcgtaggcgatttcgacgccctcaccaggcagatttcgcagaacggcggttccagctcggatatgggcgcgagatacggcggcttcagggccaagtgcggcgccaacgcggattgcataaggaatatgtgcaaagcggccttcggcactgcggcgctcgcggacttgagagccggttgcgagtggtacatagactggttcaagatggccgataatcccagcgtctcatataaggaagtcacctgcccgcaagcgctggtcgacaagtacaagggcaacttcagcgccacgcccacgccgccgcccacgccgcccacgccagtacccacgaaaggcgacactatcaaggtggaagcggaaaacttcgcgagcaaaaacggcaacaacatacgggtcgaggacggcgctatcggctatatcgaaagcggaaactcggtgacctacaacgtgaccgccggaaaggccgggacggccgcgctgcagttccgcatcgccacagaggttcaaagcagtttctcggtggaagtgaacggcacgaacgtaggaacaatatcccaaggcagcaccggcggctggagcgctttcaaaatggtgcaactcaacaacggcgcaacccttaaggccggacagaatacgataacgctcaaatttgagtctgcggtcaatatcgacaacttcctgctcatcggcgacatcaaaggcaattcgtcgccggtcaagcacgtcgccgcggaagctgccggacactccggcataacgctgaaacccgtctccggcggcttcaacgccaatttgccggcgggccacggattcacgtcgtacaaattgattaacttgcagggcagggagataagaagcggcaggataagcgacggcgcgaacaacctaagcgcgggcggcctgaaccacagcgtgttcttcctgaaattggaaggcaagggcaagacgccggcgtcgctgaaggtcgtgacgtattga

SEQ ID NO: 72 - protein, 469 aa, Unknown
  Obtained from environmental sample
MKKMFFAVALCVVFLAVGAHAQQNGVTTRYWDACKPSCGWTGNAGGSPNGVCKSCNITGGVESSNDSRSACENGPAFTCMKQAPWAIDENMSYGFVANNKVGCGKCVEFTFNNTAVSGKKMTVMVSNFGNLGGDAHFDIMIPGGGVGDFDALTRQISQNGGSSSDMGARYGGFRAKCGANADCIRNMCKAAFGTAALADLRAGCEWYIDWFKMADNPSVSYKEVTCPQALVDKYKGNFSATPTPPPTPPTPVPTKGDTIKVEAENFASKNGNNIRVEDGAIGYIESGNSVTYNVTAGKAGTAALQFRIATEVQSSFSVEVNGTNVGTISQGSTGGWSAFKMVQLNNGATLKAGQNTITLKFESAVNIDNFLLIGDIKGNSSPVKHVAAEAAGHSGITLKPVSGGFNANLPAGHGFTSYKLINLQGREIRSGRISDGANNLSAGGLNHSVFFLKLEGKGKTPASLKVVTY

SEQ ID NO: 73 - DNA, 1239 bp, Unknown
  Obtained from environmental sample
atgctagccacattaacgctaacctcatgcaagggcaaaactgaagcacgggaggaaaatcaaacgtctcctgaccaaattcctacagagccataccttgtggacgattatcagcttgagcggccaggcggaaagacagcgtttgattattttaaggaagaaaagattctcgctggatggaatttggggaatacccttgattccttcaacggcagtgtcggaggcgagacgagctggggcaatcccactgtcaatcaggaattgatgaacggggtaaaagccgccggttttgacctaatccgcattcctgtgacatggatggggcatataggcagggctcccgattaccggatagcgccatcccgcctgaaccgggtgggcgaagtcgtgcggatggcgcatgaggcggggttgaaagtaattatcaatttgcaccatgacggctccacttccagcgagcagcaggaaagcggctggctttcaataggcaagtcatacaaagatgaaactgtttataaagcgataacagatcgatttacgcatgtttgggagcagatagcggcgtattttcagaattacggcgactggctgatcttcgagcccatgaacgaaattcacgacggcggctggtgctggagcaacgctttcagatcaaaccctgccaggcagttggaaataataaacaactggaaccaaatctttaccgatacggtacgcgccgcggggggaaacaacgcggagcgttatctggtaattccggcgtactgtacaaacccccagcagacgctctccgactcgtttatactgccaagggacagcgccgccaacaggcaggttgttacttttcattattatgatccttacgaatttggaatacagggatcgcgttttgaatggggctcgccagctgacaagcaaaaaacaaacgacgattttgccccttttaagccacgctttatcgacaaaaacattccggtaatcatcggcgaatgcggcgcggttttgcagttatatccaaacgaccctgcgaaagaagcgcaggcgcgtaaaagcaggtttgaatatcttccccatatattcgccacagcaaaaaaatactctcttgtcccgatctattgggataacggagtcacattcgggagcggggaaaaattcggccttcttgatcgattaacgggccgacctaattcggtagatagcgaaactcttataaggttaatgataaatgctgttagataa

SEQ ID NO: 74 - protein, 412 aa, Unknown
  Obtained from environmental sample
MLATLTLTSCKGKTEAREENQTSPDQIPTEPYLVDDYQLERPGGKTAFDYFKEEKILAGWNLGNTLDSFNGSVGGETSWGNPTVNQELMNGVKAAGFDLIRIPVTWMGHIGRAPDYRIAPSRLNRVGEVVRMAHEAGLKVIINLHHDGSTSSEQQESGWLSIGKSYKDETVYKAITDRFTHVWEQIAAYFQNYGDWLIFEPMNEIHDGGWCWSNAFRSNPARQLEIINNWNQIFTDTVRAAGGNNAERYLVIPAYCTNPQQTLSDSFILPRDSAANRQVVTFHYYDPYEFGIQGSRFEWGSPADKQKTNDDFAPFKPRFIDKNIPVIIGECGAVLQLYPNDPAKEAQARKSRFEYLPHIFATAKKYSLVPIYWDNGVTFGSGEKFGLLDRLTGRPNSVDSETLIRLMINAVR

SEQ ID NO: 75 - DNA, 1755 bp, Unknown
  Obtained from environmental sample
ttgcagagaacgcccgttatccgccgaacccgccggctgtccgccgccgcgatcgttctgtcagcgctggcggcgttcgctccgagcgctcgcgcgaccactatggaaaatatcaggctgaaccagatcggctactacccggagtcgcgcaaggtcgcgaccgtcgttgtgggcgacgacaagagcgcgccgtcggagtttcttgtcgtcggggtgccgggcgacaagacggttttcaggggcaaactctccgccgaactttttttgtgggaggagtccggggagcgcggcttccgcgccgatttttcagcggtcagcgccccggggcagtacaaactcgtgatcttgggtgatgtgccgtacaagagcgagtcctacccgttcgcgatttcagaccgggcgttcaaggatgtggcgaccgcctctatgcgtacctactactttcagcgctgctccttcgcgctctccaaaaagaacgccggcaagtgggcccgcgccgccgggcatcccgatttggacgtcacctaccacccgtcgagcgggcactgggagggcgagggaaaggttgcctcgccgggcgggtggtacgacgcgggggatttcggcaagtacgtcgtcaactcgggcataacggtggggacgctcttggccttctacgaacgtttccccaactacttccccgacaagagtttggacattccggagtcgggcagcgggcggcccgatattctcgacgaggtgaagtttaatctggattggatgaagacgatgcaggacgcggacggcggagtcttcttcaaagtgaccaccctctcgttccccggatacatcatgccggaggaggacaagggccagaggttcgtcataggcaagagcacgacgtcgtcgctgaacttcgccgccgcgatggcgatggcggggcgggtgtacgcgccgatcgacagcatctacgcgaaaaattgcgtcgagcgggcgctctcggcttgggattgggcggtgaagaaccccggcgcggtcttcaagaatccggcggacgtaaagaccggggagtacaaggacgcggcgttcgacgacgagtttatctgggcggcggcggaactcttcatcaccacgaaagagaaacgtttcgccgatttcctgaagggcaaggagatcgcctacgccggcgaaccgtcttggcagaacgttcattcattggcggccctgtcgctcgccaccgtcaagaacggtttggatcagaatagactggaggccatacgcaagtcgataacgaaaacagcggacaagtggctggcggagatggacaagcatctgtacagggtgccgaacatgaaattcatctggggctctaactcgagtttcgccaacatgggcgcggggatgatctacgcgcatatcatatcgggagacgataagtatctcttaggcgcggttgaaatcgccgattatctgttggggaaaaacgccgttggaatttcgtttgtcagcgcgttcgggagtaaggcgatgtcgaacccgcaccacaggcagagcgtcgcggggaaagtcggcgctattcccggcttcctggctggcggcccgaacgccgggcagcaggacggtacgaacggggtgacatattcgtctaaattaccggctaagagttacgaggatgtctacaagagttacgcttcgaacgaagtggcgataaattggaacgctccggcggtgtttttgtttggggcgatagacgcgttgatgcagggcaggaagtga

SEQ ID NO: 76 - protein, 584 aa, Unknown
  Obtained from environmental sample
MQRTPVIRRTRRLSAAAIVLSALAAFAPSARATTMENIRLNQIGYYPESRKVATVVVGDDKSAPSEFLVVGVPGDKTVFRGKLSAELFLWEESGERGFRADFSAVSAPGQYKLVILGDVPYKSESYPFAISDRAFKDVATASMRTYYFQRCSFALSKKNAGKWARAAGHPDLDVTYHPSSGHWEGEGKVASPGGWYDAGDFGKYVVNSGITVGTLLAFYERFPNYFPDKSLDIPESGSGRPDILDEVKFNLDWMKTMQDADGGVFFKVTTLSFPGYIMPEEDKGQRFVIGKSTTSSLNFAAAMAMAGRVYAPIDSIYAKNCVERALSAWDWAVKNPGAVFKNPADVKTGEYKDAAFDDEFIWAAAELFITTKEKRFADFLKGKEIAYAGEPSWQNVHSLAALSLATVKNGLDQNRLEAIRKSITKTADKWLAEMDKHLYRVPNMKFIWGSNSSFANMGAGMIYAHIISGDDKYLLGAVEIADYLLGKNAVGISFVSAFGSKAMSNPHHRQSVAGKVGAIPGFLAGGPNAGQQDGTNGVTYSSKLPAKSYEDVYKSYASNEVAINWNAPAVFLFGAIDALMQGRK

SEQ ID NO: 77 - DNA, 1140 bp, Unknown
  Obtained from environmental sample
atgaaaaaagtaatactaattttaccgcttgtgatattattcgcgttaatggattgtacctctagtgtaaataaaagaaatcaggaaaattccgatatggcaaatgtgaatgtgccgagcagtatgcttcatacggtgggaaataaaatattaaatgaaaaaggcgaagaagtaagacttgctggcgtaaacatttgcagccttgaatggaacagtaagggagataatgtgctcgcttcgacgcgtgaagtttttacaaactggaattgtaatatagtacgcctgcctttgtcgcaggatcgctggtttggcaaagtatcggactggagtacgccaaaaccgccggacggcggcgcacaataccgaaaaatagtggatgatgtaataaagctcgctttaaattccggcaagtatatactgcttgacctgcactggtcaaatgccggagagtggggagaaaacattggacaacattatatgcccgatgaaaattcgctggaattctggattgacgttgcggaaaaatactcaaataacagcgctgttttgtttggtttgtacaatgagcctcatgatataacatggaaagtatggagagacggcgggactgttaatgaaacggaaaacaggggcaagcctgacgaaaaaaagtttacctatattacgccggggcatcaaaaaattgtcaatgaaataagagcgttaggagcgaataacataattgtcgccggaggcgttgactgggcttatgatttgcgggggatagcctctgtttacgcgcttacagatactccggggggtaacggaattgtgtatgattcgcatatatatccgtttaaggaatgggatggcaagaatcatgacgccaaggttctgtgcatagtggtagattatcccatattaatcggtgaaatcggcattgatccggaaggacaatggggagcggcaaaatatcccacatggctgagcgatatgcttgattggatagatctcaataaattgaattgggcaggttggtgtttccatactgcggcgaccccgaatatgatttcggattggcggtatacgccgacaaaacaccacggggctataattaaacaaaggttactgtcatatcccaatgcccatataataaattga

SEQ ID NO: 78 - protein, 379 aa, Unknown
  Obtained from environmental sample
MKKVILILPLVILFALMDCTSSVNKRNQENSDMANVNVPSSMLHTVGNKILNEKGEEVRLAGVNICSLEWNSKGDNVLASTREVFTNWNCNIVRLPLSQDRWFGKVSDWSTPKPPDGGAQYRKIVDDVIKLALNSGKYILLDLHWSNAGEWGENIGQHYMPDENSLEFWIDVAEKYSNNSAVLFGLYNEPHDITWKVWRDGGTVNETENRGKPDEKKFTYITPGHQKIVNEIRALGANNIIVAGGVDWAYDLRGIASVYALTDTPGGNGIVYDSHIYPFKEWDGKNHDAKVLCIVVDYPILIGEIGIDPEGQWGAAKYPTWLSDMLDWIDLNKLNWAGWCFHTAATPNMISDWRYTPTKHHGAIIKQRLLSYPNAHIIN

SEQ ID NO: 79 - DNA, 1251 bp, Unknown
  Obtained from environmental sample
atgaagaagtttctgctatgtctgttggtgcctgtcctgctggcagtatcctgcccttcgtcgcctgccgcgcagaagaagaagggaggggtagacctttcctatgttcctgtcattcccgataccgaaaataattacgctccggagtcgatgagtgaaaaaacagccttcgattatttcagggatgaaaaactcctggtcggctggaatatcgggaacacgctggacgcttacaacaacgggcgggcaaacgaaacaggttggggcaaccccagaataaaccaggaattgcttaacggaatcaaaaaagccggttttgatctggtccgcgttcccattacctggatgggctacatcggtcccgcgccggatcatcatatcaataaagattatctggaacgcgtcgccgaagtggttagtatggcgcacaaggccggtctcaaggtgattatcaacctgcaccacgacggttcaaccgaaagcggcggcaaggacaacggttggctttcgattagcaaagcccgcgcaagcgcggaaggctacgatgaggtaacctttaaatttgtgcgggtatggaaacagatagcgacgtatttcaaaaattacggcgactggctgatctttgaatcaatgaacgagattcatgacggcaattggggcaatggaagcgtacagggtacgcaagccgacattgtgaatgactggaaccggctttttatccagatcgcacggggaaccggagccaataacgcggtccgttatgtggtgattcccggctactgtaccaagccccagcatacgctggcaaattatttttggctgccgcccgacagcgctcccgaccggcagattgtcacctttcattactatgacccttatgaattcgcaatcgccggtacgcgtttggaatggggttcggcggcggataaaaacagggtggccaatgattttgccccctttaagtcaaaatatatcgacaataacatcccggtaattatcggcgaaacgggcgcggtgcggcagttgtacgcagacaaggcgcaggaagacaaggcgcggcaaaatcggcttaattatctttcatgggtgttcggcaaggccaaagaaaatggtctggttcctatctactgggacaacgggcttttcagcggggatggggaaagattcggcctctttaaccgcggtaacggtcagccgaattcagcggaaagcgaggcctgtatcaaggcaatgattggagcggttaaataa

SEQ ID NO: 80 - protein, 416 aa, Unknown
  Obtained from environmental sample
MKKFLLCLLVPVLLAVSCPSSPAAQKKKGGVDLSYVPVIPDTENNYAPESMSEKTAFDYFRDEKLLVGWNIGNTLDAYNNGRANETGWGNPRINQELLNGIKKAGFDLVRVPITWMGYIGPAPDHHINKDYLERVAEVVSMAHKAGLKVIINLHHDGSTESGGKDNGWLSISKARASAEGYDEVTFKFVRVWKQIATYFKNYGDWLIFESMNEIHDGNWGNGSVQGTQADIVNDWNRLFIQIARGTGANNAVRYVVIPGYCTKPQHTLANYFWLPPDSAPDRQIVTFHYYDPYEFAIAGTRLEWGSAADKNRVANDFAPFKSKYIDNNIPVIIGETGAVRQLYADKAQEDKARQNRLNYLSWVFGKAKENGLVPIYWDNGLFSGDGERFGLFNRGNGQPNSAESEACIKAMIGAVK

SEQ ID NO: 81 - DNA, 2895 bp, Unknown
  Obtained from environmental sample
ttgcagtttgacctggccgccaacgattactcgggcggttccgtctgcctgtacaatatgatgtacgacctcaacccgtacatcaacgccggcgcgttgcagttttgggtaaaaggcaataacggcgccgagatcgcttgggccgccctcgtcgacgacgaaaacggcgacggcaagaaaaccgtggtgcgcctccccgtcaacaattacggcggcatcacgaaagattggacgctcgtcagcatcccactcgtcgatttcggcaagcgcggcgtctactgggacgcaaagaaacgcgtcgaggtgcccgagcctttccagtgggacaaggtctgcgagttccgcatcgagatcaagaagaacgaaaacccctccttccgtatttgggtggacgacattttcatcgtcagcaacgtctttgaggccaaagagatcgaaaacgtagagtattgggacgataaggacgaggtgcttgacgatattcccgtggcgagcaagcccgcggtcaaggagaccgacaaggtcatgccgggcggcgagccgacgggctttgcctatgtctacggcggcaagacggcctacaagacgcagaagactaagagcggcgcgccggttttcgcttgctacatggacggcaacgagtactccggcgtcacgatttccttgggcgagggcaagttcgccaacctgacgaacgccaggacggcgaagtccgccggcatcgccttctggggccgcggcggcccgaatgtgggcaccgtcgccataggccttatggacaaccagggcaagaacgccgctggcgtggaggtcaaggttcagaccaagctgatactcggcgacttcggcaaggtcgagcaggcgtggaagtactacatggtgcctatccgctccttcaggccggagggtttatactgggacgacagcaagagcgccgaggtctcaaacaaagtggactggacgaagatacaggaggttcgcttctccataggcaagggcgagaacaaagttcccgccggcgatccggtctcgttctacgtcagcgacatatcctttatagaggagattccgggctatgtgaacccggacgactactggaacgcgttcaaatcgagcgctgcggagataaaactgcacgactttgagacggagggcgaccagaagtgggagcaggcgaacgggccgaagtccgaggtcgcgcacaagttctccgagtcgggcgcccctaacggcggcaaggcggcgctggaggttacctacaggctggccgactgggtagacgtgctgtacaactacaggactcagaaccgccaagccgagcaccgcgactggacgaagcactggggcctgaagttcgacttctacaccgacaagccctaccagccgataaccgtccaggttcaggacaagggcaacgagatattcgtggccccggcgggcggcaacaaggggtggacggaggttatcgtcccgttcaagaacttctccaagttcccctactaccagccggaagacgcgcagcaaaacggcaagtttgacctcgacggcgtcatagtgctcgacttcaagcccgccggcgaaggctcccgcggcacgttcaaggtcgacaacgtcaggctgaccaacgacagggttgccaaggtcaaggaggatccggccaaggtcgcagtgacggttacgggcagcgacaaggagatcacgaagaagataaacgagggcctgttcggcataaacgccgcgctttgggacggcgacttgttgcttccggccacggagaagttcgtgaaggacgtgaaccaccacgtcctgcgttatccgggcgggctgcgcgccgacgaggatcactgggaagaggtgctcaagaagaaggactggatggtcgacatagacgagttcgtggagtactgcaagaagacgaacacgacgccgatgatcacggtcaacttcggcaccggcacgccggaggaggcggccaaatgggtcaaccacgtgaacaaggtcaagaaggccaacgtgaagtactgggagatcggaaacgagctgtacggcgattggcacgccaatcactgcacgccggaggagtacggcaagcgggcgagggagttcgcgaagcagatgaaggcggttgatccgagcataatcgtcacggcggtctggatgcttgagggcgactggaacaagaagacctttgagctgctcaaggatgtggtagacggcgtgaacgtccaccactacccgcagcacgccggccaggagaacgacgcggggcttttggccgcgccgcagactctgaacgagatattaccgggcgttcgggagcagctgaagcagcacggcgcgccgggcaagaagtacgaggtttggctgacggagtggaactcggttgactttgacccgggcgtccagacgctgggcatagtcaacgccctcttcgtggccgactacctcggcatgctcacgcaccacaacatagagcaggcgtcgtactgggacatccacaacagcatcaccccgcagggcggcgactacggctacctgtctcgcaccggggcgccggacggcgacaatgtgccgcgcccgtcgtactgggctttcaagatggcgagccacagccttggccgcgggtcgcttttggagtcgggcaccggtaacgaccgcgtttcgagctactacacgctcgacggcaagaagaagtcgctgatgatcatcaacaagcaccccaagagcgtcgcggatgttactatcaacatcccgggcttccagggcaaggccaagaagctccttttgaacggcgaaaacgccaaaaaggggccggcggaggaggctatagacgtgaagccggggattaagctgtccatgccggcgcactcggtggtcacgattacgcttgaataa

SEQ ID NO: 82 - protein, 964 aa, Unknown
  Obtained from environmental sample
MQFDLAANDYSGGSVCLYNMMYDLNPYINAGALQFWVKGNNGAEIAWAALVDDENGDGKKTVVRLPVNNYGGITKDWTLVSIPLVDFGKRGVYWDAKKRVEVPEPFQWDKVCEFRIEIKKNENPSFRIWVDDIFIVSNVFEAKEIENVEYWDDKDEVLDDIPVASKPAVKETDKVMPGGEPTGFAYVYGGKTAYKTQKTKSGAPVFACYMDGNEYSGVTISLGEGKFANLTNARTAKSAGIAFWGRGGPNVGTVAIGLMDNQGKNAAGVEVKVQTKLILGDFGKVEQAWKYYMVPIRSFRPEGLYWDDSKSAEVSNKVDWTKIQEVRFSIGKGENKVPAGDPVSFYVSDISFIEEIPGYVNPDDYWNAFKSSAAEIKLHDFETEGDQKWEQANGPKSEVAHKFSESGAPNGGKAALEVTYRLADWVDVLYNYRTQNRQAEHRDWTKHWGLKFDFYTDKPYQPITVQVQDKGNEIFVAPAGGNKGWTEVIVPFKNFSKFPYYQPEDAQQNGKFDLDGVIVLDFKPAGEGSRGTFKVDNVRLTNDRVAKVKEDPAKVAVTVTGSDKEITKKINEGLFGINAALWDGDLLLPATEKFVKDVNHHVLRYPGGLRADEDHWEEVLKKKDWMVDIDEFVEYCKKTNTTPMITVNFGTGTPEEAAKWVNHVNKVKKANVKYWEIGNELYGDWHANHCTPEEYGKRAREFAKQMKAVDPSIIVTAVWMLEGDWNKKTFELLKDVVDGVNVHHYPQHAGQENDAGLLAAPQTLNEILPGVREQLKQHGAPGKKYEVWLTEWNSVDFDPGVQTLGIVNALFVADYLGMLTHHNIEQASYWDIHNSITPQGGDYGYLSRTGAPDGDNVPRPSYWAFKMASHSLGRGSLLESGTGNDRVSSYYTLDGKKKSLMIINKHPKSVADVTINIPGFQGKAKKLLLNGENAKKGPAEEAIDVKPGIKLSMPAHSVVTITLE

SEQ ID NO: 83 - DNA, 1266 bp, Unknown
  Obtained from environmental sample
gtgaattttagaaaaaaactgttgttcacatttattatatatactctcctgctgaccttttgccgctcttccaatggggaggcggctgaatcaacttataattatgttccctctcagccggacattatacgggaatatccgcaggaacctgtcagcgggaaaacggcgtttaattattttaaagatgaaaaaatatattccggctggaatatgggaaacactttggattcgtattccggcggagtgggaaacgaaacagtttggggcaatcctcccattaacaaagagataatgagcggcgtaaaaaaagccgggttcgatattatccgtattccggtaacatggatgggttatttcggcatgccgcccgattaccgtatcagttccagccgtcttgaacgcgtagcggaagccgtggaaatggcgcataacgcgggattaaaggtaattatcaatattcaccatgacggctcgtctccgcaagagggcatggacaacggctggctttcaatgacaagagcgttaaagaacaaaggtgagtataatcaaataacgcatcaatttgcgcgcgtttgggatcaggttgccgcgtattttaaaaattacggcgattggcttatgtttgaatcgatgaatgagattcacgacggcggctggggctggagttataactttcagactttcccgaaatttcaaactgatattgtcaataaatggaatcagatttttacggacagggtgcgcgcgtcagggggcaacaataccgatcgttatttgattattcccgcctattgcactcagccgcagcaaacgctgtccggtaattttgtactgccaaaggacgttgcgtccggcaaacagattgtcactttccattactatgacccgtatgagttcagcatagcgggtaaacgctccgcgtggggaacggacggcgacaaacaaaaaatagacggcgattttgcgccttttaaaaagatatttatagataacgatattccggtaataatcggggaaacaggcgcggcattgcagctgtatccaaacgacaaaggagttgaggcgcaggcgcgccagagcagaataagctacattaccagtgtgtttgttactgccaaaaaatacggacttgttccaatttattgggacaatggctctacaagcggtaatggggaaaaattcggtctttttgaccgtaggacggggcaagccaattcggcggacagttccacccttatcaacattatggttaatagtgtaaaatag

SEQ ID NO: 84 - protein, 421 aa, Unknown
  Obtained from environmental sample
  SIGNAL (1)...(28)
MNFRKKLLFTFIIYTLLLTFCRSSNGEAAESTYNYVPSQPDIIREYPQEPVSGKTAFNYFKDEKIYSGWNMGNTLDSYSGGVGNETVWGNPPINKEIMSGVKKAGFDIIRIPVTWMGYFGMPPDYRISSSRLERVAEAVEMAHNAGLKVIINIHHDGSSPQEGMDNGWLSMTRALKNKGEYNQITHQFARVWDQVAAYFKNYGDWLMFESMNEIHDGGWGWSYNFQTFPKFQTDIVNKWNQIFTDRVRASGGNNTDRYLIIPAYCTQPQQTLSGNFVLPKDVASGKQIVTFHYYDPYEFSIAGKRSAWGTDGDKQKIDGDFAPFKKIFIDNDIPVIIGETGAALQLYPNDKGVEAQARQSRISYITSVFVTAKKYGLVPIYWDNGSTSGNGEKFGLFDRRTGQANSADSSTLINIMVNSVK

SEQ ID NO: 85 - DNA, 1755 bp, Unknown; identical to SEQ ID NO: 75
  Obtained from environmental sample

SEQ ID NO: 86 - protein, 584 aa, Unknown; identical to SEQ ID NO: 76
  Obtained from environmental sample

SEQ ID NO: 87 - DNA, 1257 bp, Unknown
  Obtained from environmental sample
atgttctctttaatactgaccgcatgcatgggtaaaactgaagcacgggaaaatacaatgtcttctagccaaatttctcaagagccgtatcttgtagatgattatcagcttgaacagtcaagcggaaaaacagcatttgattactttaaggaagaaaagatttttgcaggctggaatttggggaatactcttgattcttttaatggtaatatcggaagcgaaacaggctggggtaatcctgctgtcaatcaggagttgatgaacggggtaaaagccgccggttttgacataatccgcattccggtaacatggatggggcatatcggcaaggctcccgaacaccggatagcgccttcacgcctgaaccgagtaggcgaagttgtgcggatggctcataacgcaggattaaaggttattatcaatttacaccatgacggttctacttccagcgagcagcaggagagcggctggctctcaatcggcaagtcgtacaaaaatgaagctgattataaaaggataacagatcaatttacccgtgtgtgggagcaaatagcggcatattttcaaaattacggcgactggcttatgttcgaatccatgaatgagattcacgacggcggctggtgctggagcagcgctttcagatcaaacccaagcaagcaattagaaatagtaaacaattggaatcaaatctttacggataaggtgcgcgccgcagggggaaacaacgcggagcgttatctggtaattccggcatattgtacaaaccccaagcagacgcttttagctacatttatactgccaaaagacagcgccgccgacaaacaggttgttacttttcattattatgacccaaatgaattcggtatagaaggaacacgctttgaatggggatcaccggctgacaaacaaaaaatagaaaacgattttgctccgtttaagccgcgctttatcgataaaaatattccggtaattataggtgaatgcggcgcagttctgcaattatatccgaatgactctgcaaaggaagaacaggcgcgcaaaagcaggtttgaatatattccctatgtgtttgcaacggcaaaaaaatacgggcttgttccggtttattgggataacggagccgtaaacggaaacggagaaaaattcggtctttttaacagaaggacaggtcagccgaattcggaagatgacggagttcttatcagattaatgataaatgctgttaaatatgagtggaaaaaattttatgaataa

SEQ ID NO: 88 - protein, 418 aa, Unknown
  Obtained from environmental sample
MFSLILTACMGKTEARENTMSSSQISQEPYLVDDYQLEQSSGKTAFDYFKEEKIFAGWNLGNTLDSFNGNIGSETGWGNPAVNQELMNGVKAAGFDIIRIPVTWMGHIGKAPEHRIAPSRLNRVGEVVRMAHNAGLKVIINLHHDGSTSSEQQESGWLSIGKSYKNEADYKRITDQFTRVWEQIAAYFQNYGDWLMFESMNEIHDGGWCWSSAFRSNPSKQLEIVNNWNQIFTDKVRAAGGNNAERYLVIPAYCTNPKQTLLATFILPKDSAADKQVVTFHYYDPNEFGIEGTRFEWGSPADKQKIENDFAPFKPRFIDKNIPVIIGECGAVLQLYPNDSAKEEQARKSRFEYIPYVFATAKKYGLVPVYWDNGAVNGNGEKFGLFNRRTGQPNSEDDGVLIRLMINAVKYEWKKFYE

SEQ ID NO: 89 - DNA, 2484 bp, Clostridium thermocellum ATCC 27405
ttgttttttgtaaaggatttttgtaaaggagagggtaatgtgaaaaaaattgtttctttggtttgtgtgcttgtgatgctggtaagcatcttaggctcgttttcagtcgtagcggcatcaccggtaaaaggctttcaggtatcgggaacaaagcttttggatgcaagcggaaacgagcttgtaatgaggggcatgcgtgatatttcagcaatagatttggttaaagaaataaaaatcggatggaatttgggaaatactttggatgctcctacagagactgcctggggaaatccaaggacaaccaaggcaatgatagaaaaggtaagggaaatgggctttaatgccgtcagagtgcctgttacctgggatacgcacatcggacctgctccggactataaaattgacgaagcatggctgaacagagttgaggaagtggtaaactatgttcttgactgcggtatgtacgcgatcataaatgttcaccatgacaatacatggattatacctacatatgccaatgagcaaaggagtaaagaaaaacttgtaaaagtttgggaacaaatagcaacccgttttaaagattatgacgaccatttgttgtttgagacaatgaacgaaccgagagaagtaggttcacctatggaatggatgggcggaacgtatgaaaaccgagatgtgataaacagatttaatttggcggttgttaataccatcagagcaagcggcggaaataacgataaaagattcatactggttccgaccaatgcggcaaccggcctggatgttgcattaaacgaccttgtcattccgaacaatgacagcagagtcatagtatccatacatgcttattcaccgtatttctttgctatggatgtcaacggaacttcatattggggaagtgactatgacaaggcttctcttacaagtgaacttgatgctatttacaacagatttgtgaaaaacggaagggctgtaattatcggagaattcggaaccattgacaagaacaacctgtcttcaagggtggctcatgccgagcactatgcaagagaagcagtttcaagaggaattgctgttttctggtgggataacggctattacaatccgggtgatgcagagacttatgcattgctgaacagaaaaactctctcatggtattatcctgaaattgtccaggctcttatgagaggtgccggcgttgaacctttagtttcaccgactcctacacctacattaatgccgaccccctcgcccacggtgacagcaaatattttgtacggtgacgtaaacggggacggaaaaataaattctacagactgtacaatgctaaagagatatattttgcgtggcatagaagaattcccaagtcctagcggaattatagccgctgacgtaaatgcggatctgaaaatcaattccaccgacttggtattgatgaaaaaatatctactgcgctcaatagacaaatttcctgcggaggattctcaaacacctgatgaagacaatccgggcattttgtataacggaagattcgatttttcagatccgaacggtccgaaatgcgcctggtccggcagcaatgttgagctgaatttttacggcacggaagcaagtgtgactatcaaatccggcggtgagaactggttccaggctattgtagacggcaatcctcttcctcctttttcggttaacgctactacctctaccgtaaagcttgtaagcggtcttgcagaaggagctcatcatcttgtattgtggaagaggacagaggcatccttgggagaagttcagttccttgggtttgattttggttcaggaaagcttcttgccgcaccgaagcctttggaaagaaagattgagtttatcggagactccatcacatgtgcatacggaaatgaaggaacaagcaaggagcagtcttttacaccgaaaaatgaaaacagctatatgtcttatgcggcaattacagcccgtaatttgaatgcaagtgcaaatatgattgcgtggtccggaatcggacttaccatgaactacggcggagcccccggacctcttataatggaccgttatccttatacccttccttacagcggagtcagatgggattttagcaaatatgtgcctcaggttgttgtaatcaatcttggtaccaatgatttttctacatcatttgcagataaaacaaagtttgtaacggcatataaaaaccttataagtgaagttcgcaggaactatccggatgcccatatattctgctgtgtcggtccgatgctttggggaacgggcctggatttgtgccgcagttatgttacggaagttgtaaatgattgtaacagaagcggggatttaaaggtgtattttgttgagtttccgcagcaggacggaagcaccggatacggagaagactggcatccaagtattgccacccaccagctgatggctgagcggcttactgcggaaataaaaaacaagcttggatggtaa

SEQ ID NO: 90 - protein, 827 aa, Clostridium thermocellum ATCC 27405
  SIGNAL (1)...(38)
MFFVKDFCKGEGNVKKIVSLVCVLVMLVSILGSFSVVAASPVKGFQVSGTKLLDASGNELVMRGMRDISAIDLVKEIKIGWNLGNTLDAPTETAWGNPRTTKAMIEKVREMGFNAVRVPVTWDTHIGPAPDYKIDEAWLNRVEEVVNYVLDCGMYAIINVHHDNTWIIPTYANEQRSKEKLVKVWEQIATRFKDYDDHLLFETMNEPREVGSPMEWMGGTYENRDVINRFNLAVVNTIRASGGNNDKRFILVPTNAATGLDVALNDLVIPNNDSRVIVSIHAYSPYFFAMDVNGTSYWGSDYDKASLTSELDAIYNRFVKNGRAVIIGEFGTIDKNNLSSRVAHAEHYAREAVSRGIAVFWWDNGYYNPGDAETYALLNRKTLSWYYPEIVQALMRGAGVEPLVSPTPTPTLMPTPSPTVTANILYGDVNGDGKINSTDCTMLKRYILRGIEEFPSPSGIIAADVNADLKINSTDLVLMKKYLLRSIDKFPAEDSQTPDEDNPGILYNGRFDFSDPNGPKCAWSGSNVELNFYGTEASVTIKSGGENWFQAIVDGNPLPPFSVNATTSTVKLVSGLAEGAHHLVLWKRTEASLGEVQFLGFDFGSGKLLAAPKPLERKIEFIGDSITCAYGNEGTSKEQSFTPKNENSYMSYAAITARNLNASANMIAWSGIGLTMNYGGAPGPLIMDRYPYTLPYSGVRWDFSKYVPQVVVINLGTNDFSTSFADKTKFVTAYKNLISEVRRNYPDAHIFCCVGPMLWGTGLDLCRSYVTEVVNDCNRSGDLKVYFVEFPQQDGSTGYGEDWHPSIATHQLMAERLTAEIKNKLGW

SEQ ID NO: 91 - DNA, 2274 bp, Unknown
  Obtained from environmental sample
atgaaaggggaagaagagagaatggtaaaaagaaaaatttctgttttactagcagcagctatgctagttagtgcgctgacgccaatgactgcatttgctcagcttacaccacagcacaaaccaaatggtcacacagctacggggacttcttatgaaaaattgtttttagagttataccaggacatctcaaatcgctcaaacgggtactatagtgctgagagtatcccatatcactcaattgagacaatgattgttgaagcaccagactatggacatgttacaacaagtgaagctttcagttactatgtttggttagaagctatctatggaagaatttcaggaaactggaaacccttcaatgactcctggaaagtaatagaagattacatagttccaaaagatagtatccagttagcaggaatgcagagatacgatccatccagtcctactacttatgcagatgaatatgatttgcctgacgagtatcccgcaagattgcagtttgacaagaaagttggagtagaccctgtatttaatgacttgaaaaacggttacagtgcaagccagtaccttatgcactggttgatggacgttgataactggtatggttttgatggtcctggatcaactagagctacatttataaacacattccagagaggagaagaggaatcagcttgggaaacagttcctcatccttctattgaagaatttaagtatggtggaagaaatggattcattgacctatttgtaggagataaccaatatgcacaacaatggcgttttacaaacgctccagatgctgaagcgcgtgctgtccagggtgtatactgggcaaacaaatgggctgctgcacaaggaaagaaagctgaagttaagactactgtagataaagcaactaagatgggagactttttaagaaacaatttctttgataaatattacatgaaaattggttcaggagaaagaagtgctccacagcctggtacagattatgacagttctcactatctattaggatggtatacagcatggggcggtggaatacgtgatgcatggtcatggaaaattggatgtagtcatgctcactttggatatcagagtccattccttgcatggatattgtcaactcaaagtgacttcaaacctaagacagcaaatggtgtaagagactggacaactagtttggaaagacagttggaattctacacatggttacaatcatcagatggagctatagctggtggagctacaaactcccacagaggtagatatgaaaactacccagcaaatgcagctacattccatggaatgatatatgatgcaaaccctgtttacaaagatcctggaagtaatacctggtttggtatgcaggcatggtcaatgcaccgtatagttgacttatacctcgaatcaggaaatacaatggcaaaagatctattggataaatgggtaccatgggttcttagagaagttgaattcaaagatggaacattctgggtgccatcaggaattgactggtcaggacaacctgacagatggacaggaagaagatcagcaaacagcaatcttcgtgtttcagttacttcaaaaggtcaggaccttggtgtttcaggttcacttgctagctgtttgattacatatgctgcaggtatacaaaaaaatacaggttcacttaatagtactgcacaagaagcattaaatgttggtaaaaaactccttgaccatatctggtcaacatatcgtacaaacaagggagttatggctcctgaaagacgtggagactataatcgtttcttcgatcaaacagtatacattccagctggctggagtggaaaaatgcctaacggcgacgaaatcaagcctggagttaaattcatagacattcgttcaaaatacaaacaggacccaatgtatgaaactatctacaaggcttgggtaaacaaagaagctccagaagtaacttaccaccgttactgggcacagtgtgacgttgcaattgcattgggtacaatagctgagttcttccctaacgaaaaattcacagatgtttcaaatccaccaaacccaggcggagacggacgtaaaggtgacatcaatgacgacggagatattgactcaactgatgcagtattattgagaagaataatacttgaaatacctgttacaggcgcaaatatgtgggcagcagatgttaatgatgatggagaaatcgattcaactgactacatcatgcttagaagacacgtattagaaatagctagattaccgtaa

SEQ ID NO: 92 - protein, 757 aa, Unknown
  Obtained from environmental sample
  SIGNAL (1)...(33)
MKGEEERMVKRKISVLLAAAMLVSALTPMTAFAQLTPQHKPNGHTATGTSYEKLFLELYQDISNRSNGYYSAESIPYHSIETMIVEAPDYGHVTTSEAFSYYVWLEAIYGRISGNWKPFNDSWKVIEDYIVPKDSIQLAGMQRYDPSSPTTYADEYDLPDEYPARLQFDKKVGVDPVFNDLKNGYSASQYLMHWLMDVDNWYGFDGPGSTRATFINTFQRGEEESAWETVPHPSIEEFKYGGRNGFIDLFVGDNQYAQQWRFTNAPDAEARAVQGVYWANKWAAAQGKKAEVKTTVDKATKMGDFLRNNFFDKYYMKIGSGERSAPQPGTDYDSSHYLLGWYTAWGGGIRDAWSWKIGCSHAHFGYQSPFLAWILSTQSDFKPKTANGVRDWTTSLERQLEFYTWLQSSDGAIAGGATNSHRGRYENYPANAATFHGMIYDANPVYKDPGSNTWFGMQAWSMHRIVDLYLESGNTMAKDLLDKWVPWVLREVEFKDGTFWVPSGIDWSGQPDRWTGRRSANSNLRVSVTSKGQDLGVSGSLASCLITYAAGIQKNTGSLNSTAQEALNVGKKLLDHIWSTYRTNKGVMAPERRGDYNRFFDQTVYIPAGWSGKMPNGDEIKPGVKFIDIRSKYKQDPMYETIYKAWVNKEAPEVTYHRYWAQCDVAIALGTIAEFFPNEKFTDVSNPPNPGGDGRKGDINDDGDIDSTDAVLLRRIILEIPVTGANMWAADVNDDGEIDSTDYIMLRRHVLEIARLP

SEQ ID NO: 93 - DNA, 2736 bp, Unknown
  Obtained from environmental sample
atgaggcttaaaaaattgaaaaatgccgtcgtagcaaccgggctcgcccttgggatgctttcgacaacagcattatcggcactaaattttactacaacatccttagccgcaacaaccgatccatatgaagaacgctttttagaaatgtgggaggatatccataatcctgcaaatgggtatttcagttcgcacgggataccctatcattcggtcgaaaccttgattgtagaggccccggactacgggcatgttacgaccagcgaagccctaagttattatatgtggctggaggccatgtatggcaagcttacgggggacttttcggctttcaaaaaagcatgggacatcacggaaaagtacatgatcccttccgcagcagatcagccgaacaccagcatgagcaaatatacgcccagcaaaccggccacatatgcaggggaatacgaattgccggaattatatccgtcccaactgaactccagtgcggcagtaggttcagacccaatctataatgatttggtttctacctatggcacatccactatttacggcatgcactggctgcttgatgtggacaactggtatggttttggccgcaggggcgacggaaaaacatcaccttcctttatcaatacgttccaaaggggcgtccaggaatccgtttgggaaaccatcccccaacctagctgggacagcatgaccttcggcgggaaaaacggttacttggacctctttaccggcgacagtgcctatgcgccacagtttaagtatacgaatgcgccggatgcggatgcacgtgccatccaggcaacctattgggccaatgaatgggcaaaagaagctggcgtcaacttaaattcttatgttgacaaggcagcaaaaatgggcgattacttaaggtattccatgttcgataagtattttcgcaagatcggcacgccaactgccgcaggaagcggatatgattcggcccactaccttctttcctggtattatgcctggggaggcggagtcagcaccgattgggcatggatcatcggaagcagccacaaccattttggctaccagaacccgatggcggcatggatcctatccgagaatgcagcgtttaaaccggattcaaaaaaaggcgcaagcgactgggcaacaagcctgacaaggcagcttgaattctaccagtggctgcaatcggcagaaggcgcgattgcaggcggcgcaagcaactccaataacggaagatatgagagttggccggctgggacatccacattttacggaatgggctatgtagaaaaccctgtatatgaagatccgggcagcaatacctggttcggcttccaggcatggtccatgcagcgtatcgcagaactatattatgaaaccaataatcaaaccgccaaaaaacttatggacaagtgggtagcttgggttaagtcagaagtaaagctgcacgacgacggctcgtttgatatcccttccacaattgactggtctggacaacctgatacctggacaggcacctacacaggcaaccctggtttacacgtatccgtagtgaattatggaaaagatctcgggattgcaggctctctcgccaacaccctgttatattacagcaaagcatccggtgatgacgagtccagggaactggcaaaacagctattggatcgcatgtggaacctgtaccgtgacgataaagggattgccgtaccggaagcaagaggggatttcggccgtttcctgaatcaggaagtctatgtaccttccggttggacaggcacaatgccgggcggcgacgtgatcaaaagcggcgttaccttccttgatatccgctccaagtataagcttgaccccggctatcaggcattgattacggcactgaacaaaaatgaggaccctgttttcacctaccatcgtttctgggcacaatgcgatatcgcaatcgcatacgggctatactcgacgttgtttggaaacccttcgacaccggtccccagcgcagtgattacgccctcaagcgcagattttgacaagaaccatccggcggatgttgcggtaactatgacaaccaacggaaacaccttacacggcattaaggatggcggcacttatttggcggccgactccgaatacaccgtaaatggggatacggtcacgattttatcctcctacctggcaacaaaaggaaacggccatttagtgctcacctttgattttgacaatggcacggatccggtactcacactgcgcattaccgattccaccacacctgtcatgccggtcggcaaccttaccgtacagatgcataacggatcaaatcatgcccagacaaatgggatatcgccaaagtttaaactgatcaacacagggtccactgccatcaatcttgcagatgtaacgcttagatactactacacggtagatggtgcggcagaccagaacttctggtgcgattggtccacgatcggtgccggcaacgtcattggtacctttgtcacgatggatgccgcaaaaaccggggcagatacctatctggaaattagctttacaactggggcaggctcattggcagcaggcgaatccatcgaagtccaggcaaggttctcaaaggcagattggtcgaactatacccagacagacgatcattccttcgcaagtacccatacaagtcacgctgactggcacaatgtcacagctcatttgtccgggaacttgatctggggcacagaaccatag

SEQ ID NO: 94 - protein, 911 aa, Unknown
  Obtained from environmental sample
MRLKKLKNAVVATGLALGMLSTTALSALNFTTTSLAATTDPYEERFLEMWEDIHNPANGYFSSHGIPYHSVETLIVEAPDYGHVTTSEALSYYMWLEAMYGKLTGDFSAFKKAWDITEKYMIPSAADQPNTSMSKYTPSKPATYAGEYELPELYPSQLNSSAAVGSDPIYNDLVSTYGTSTIYGMHWLLDVDNWYGFGRRGDGKTSPSFINTFQRGVQESVWETIPQPSWDSMTFGGKNGYLDLFTGDSAYAPQFKYTNAPDADARAIQATYWANEWAKEAGVNLNSYVDKAAKMGDYLRYSMFDKYFRKIGTPTAAGSGYDSAHYLLSWYYAWGGGVSTDWAWIIGSSHNHFGYQNPMAAWILSENAAFKPDSKKGASDWATSLTRQLEFYQWLQSAEGAIAGGASNSNNGRYESWPAGTSTFYGMGYVENPVYEDPGSNTWFGFQAWSMQRIAELYYETNNQTAKKLMDKWVAWVKSEVKLHDDGSFDIPSTIDWSGQPDTWTGTYTGNPGLHVSVVNYGKDLGIAGSLANTLLYYSKASGDDESRELAKQLLDRMWNLYRDDKGIAVPEARGDFGRFLNQEVYVPSGWTGTMPGGDVIKSGVTFLDIRSKYKLDPGYQALITALNKNEDPVFTYHRFWAQCDIAIAYGLYSTLFGNPSTPVPSAVITPSSADFDKNHPADVAVTMTTNGNTLHGIKDGGTYLAADSEYTVNGDTVTILSSYLATKGNGHLVLTFDFDNGTDPVLTLRITDSTTPVMPVGNLTVQMHNGSNHAQTNGISPKFKLINTGSTAINLADVTLRYYYTVDGAADQNFWCDWSTIGAGNVIGTFVTMDAAKTGADTYLEISFTTGAGSLAAGESIEVQARFSKADWSNYTQTDDHSFASTHTSHADWHNVTAHLSGNLIWGTEP

SEQ ID NO: 95 - DNA, 3003 bp, Unknown
  Obtained from environmental sample
ttgccaaagatgatgaaattgagcttaataaagaagcctatttctataatgatggccacagtcttgtttctctcactcacgaccggtctgtttaacttcagaccccaaacagctcatgctgctacaacggcagagcagacacgatttctgcagttatatgctcagttaaaggacccgtctaatggctatttctctgccgaaggaattccgtatcatgctgttgaaacactaatgagtgaagcgcctgactatggtcatatgaccacatcagaggcttatagctactggatgtggctagaggtactttatggctatcatactggggattggactaagctggaatccgcttgggacaacatggaaaagtatatcatccctatcaatgaaggggacggcgtgcaagaacagccgacaatgagtaactacaatccgaatagccctgctacgtatgcttccgagtatgcacagccggatcagtatccaagtcaactcagcactaagtatacggcaggtaaagatccgcttgatgccgaattgaaggcgacgtatggcaacaaccagacctacctgatgcactggttagtagatgtggacaattggtacggattcggcaacttgctgaatccaacgcatacagccgcttatgtgaatacatttcagcgtggtgaacaagaatccgtatgggaggcagtacctcacccatctcaagatgacaaaacgtttggcaagacaaatgaaggtttcatgagtctgttcacaaaagaagctaacgttccttccgcacaatggcgctacacgaatgctacagatgccgatgcacgcgcagtacaagctatgtattgggctaaagagctcggttacaacaatacggtatatctgaacaaagctaaaaaaatgggagattttctgcgttacggtatgtacgataagtattttcaaaaagtaggaagtgcagctacagatggcacacctgatgcaggcactggaaaagactccaatcaatatctgctggcttggtatacctcttggggcggtggccttggagcaacgggaaactgggcgtggagaatcggcgcaagccatgcacaccaaggttatcaaaatgtcgtggctgcttacgcactctctgatccggaaggtggtctgattccgtcatcagcaactgcaggagcggattggagcaattctctgaaacggcagttagaattctacacctggctgcagtctgatgaaggtgcgattgccgggggagcaactaacagttatgaaggcgcatacaaatcatatcctgccggaattagtactttctacggcatggcgtatgacgaagcgcctgtttatcatgacccaccatccaataactggtttggaatgcaggcttggagtgtggagcgggtagcagaactctactatattcttgcttcaaatggtgatactacatcagagaacttccaaatggctaaacaagttatagagaactgggtagactggtcaacggattatgcctttgcaaacgaacgtccagttacggatgctgaaggttactacttgaacagccaagggaaccgaattcttgggggagacaatcctcaagtggctactgtgttcgctccaggagaattctggattccaggtaatgtagagtggcagggacaacctaatacctggaacggcttcagtggttctacaagcaatagtaatctgaaagctgttactaaaagcccaagccaagatactggtgtgctaggaagttatattaaagcactcacattctttgctgctggttctaaagctgagcacggaagctacagtactcttggggggcatgcccaagtactggctaagtctttgctggatacagcatggggttataacgatggaatcggtattgcgaccagcgagagtcgaggagattattcccgttatttcactaaagaagtttatttcccaagtggttggacaggtacgttcggacaagggaatacgatccctggctcagctactgtggcttctgatccagctaaaggaggaaacggtgtatacgcaagttataccgatatccgtccgaatatcgtaaatgattctaagtggcaatatctgctgaataaatacaatacgtcattcaataaagtgaccaaaacatgggataatggtgcgcctgaattcacttaccatcgcttctggtcacaggttgatatggctacagcttacgctgaatatgaccgactgattaataacggaagtactccaacagaaccagtggctccaaaagctccgtctaaaccaagtgcgatcgctggtaatagtgtcgtagatcttacttggaacaatgtaacgggagctacaagctacactgtgaaaagagctgtgacaaccggcggcccttacagcaatgtggcagttgtcacgcaagcaacttacagtgatgctgccgtgatcaatggtacagattattattatgtagttagtgcttctaatgtggttggggagagcccgaattcacctgaggttcatgccaaacctattgctgttccgattccagtacaaggcgatttggtggtgaaataccgtacaaatgatacgaatcctggcgattcccagttccgtccgcagctgcagattgtgaacaacggcactactgcggtagcgcttagcaatgtaaagctacggtattattacacgattgatggagagaagacgcagcagttcaatgtcgactatgccaccattggcggaagtaacgttcaggggacattcgtaaagttgaacccagctgttgcgggagcagattattatgtggagatttccttcggcgcaggggcaggaagtctagctccgggagcgaatacaggagagatccagattcgtgtcaataaaacggattggagtaattacaatgaggttggagactactcttacgatgctaccaagacatcgtatacagagtggcaacatgtaccactgtacttgaatggtaccttggtctggggacttgagccttaa

SEQ ID NO: 96 - protein, 1000 aa, Unknown
  Obtained from environmental sample
MPKMMKLSLIKKPISIMMATVLFLSLTTGLFNFRPQTAHAATTAEQTRFLQLYAQLKDPSNGYFSAEGIPYHAVETLMSEAPDYGHMTTSEAYSYWMWLEVLYGYHTGDWTKLESAWDNMEKYIIPINEGDGVQEQPTMSNYNPNSPATYASEYAQPDQYPSQLSTKYTAGKDPLDAELKATYGNNQTYLMHWLVDVDNWYGFGNLLNPTHTAAYVNTFQRGEQESVWEAVPHPSQDDKTFGKTNEGFMSLFTKEANVPSAQWRYTNATDADARAVQAMYWAKELGYNNTVYLNKAKKMGDFLRYGMYDKYFQKVGSAATDGTPDAGTGKDSNQYLLAWYTSWGGGLGATGNWAWRIGASHAHQGYQNVVAAYALSDPEGGLIPSSATAGADWSNSLKRQLEFYTWLQSDEGAIAGGATNSYEGAYKSYPAGISTFYGMAYDEAPVYHDPPSNNWFGMQAWSVERVAELYYILASNGDTTSENFQMAKQVIENWVDWSTDYAFANERPVTDAEGYYLNSQGNRILGGDNPQVATVFAPGEFWIPGNVEWQGQPNTWNGFSGSTSNSNLKAVTKSPSQDTGVLGSYIKALTFFAAGSKAEHGSYSTLGGHAQVLAKSLLDTAWGYNDGIGIATSESRGDYSRYFTKEVYFPSGWTGTFGQGNTIPGSATVASDPAKGGNGVYASYTDIRPNIVNDSKWQYLLNKYNTSFNKVTKTWDNGAPEFTYHRFWSQVDMATAYAEYDRLINNGSTPTEPVAPKAPSKPSAIAGNSVVDLTWNNVTGATSYTVKRAVTTGGPYSNVAVVTQATYSDAAVINGTDYYYVVSASNVVGESPNSPEVHAKPIAVPIPVQGDLVVKYRTNDTNPGDSQFRPQLQIVNNGTTAVALSNVKLRYYYTIDGEKTQQFNVDYATIGGSNVQGTFVKLNPAVAGADYYVEISFGAGAGSLAPGANTGEIQIRVNKTDWSNYNEVGDYSYDATKTSYTEWQHVPLYLNGTLVWGLEP

SEQ ID NO: 97 - DNA, 2091 bp, Unknown
  Obtained from environmental sample
atgatcttgaatcgatggcgaccgaggtcggcatgcgcgatgaaatggggaagcctgatcgtggctgcttttgtctcgacaggggcgatcggcgcgcctgcgaacgggacaggaggtgtggcagtcagggtgaacaacgagcagtggcctgcagccaacgctgagatgccaactgtaacgacaacggcggaaggatttcggatcgtgaccgcaagcggacgcacgatcgaagttccaagtgagcagccctggcgtgatcgcttcctcaccatctggtggaaactccacgatccccgcctcggttattttagcgacttcaatctgccctatcatgcgaaggaaaccctgatcgtcgaagctccggactatggtcacgtgacaaccagcgagaccttcagttactgggcctggctggaagcgatgtacgcgcattacacgggggacttcgctccgctgcgctatgtctacgatcgcatagaacgctatgcgatacccacgtttcagcccacagtcgcggcttacaacccccaatcaccggcgaccttcgcccgcgagaatccgctgccaaaccagtatccctcgcctttggaaagcactgtgagcgtaggtcaggatccactcgcagcggaattgaaaggagcttatggggacagcatctacggtatgcactggctgctcgataccagcaactggtacggctacggcaaaggtttcgagccgaccttcatcaataccttccagcgtgggccgcaggaatcggtctgggaaaccgtgccgcatccttcgatcgaggactttcgcttcggcgcgccgaaccagggctttctcagtcttttcactcaggacagcagctacaagcgccagtggcgttacaccaacgctcccgacgctgacgcgcggctgattcaggccacctggctggcccggaacgtggcgcgggattggaatgtgaatctgagtgatctcaatgcgaaggcggcgaagatgggggattttctccgctacgcgatgttcgataagtattttaaagcgctgagttgtcagcagctcggctgcgctccgggccaaggctatgaaagcgcccactatctcctggcctggtactattcctggggcggctcgcatcccgacgatgcctttgccaaatggtcgtggcgtatcggagccagcgccgcgcactttggttatcagaatccattggcggcttatatcctgagccaggatgcggaattcaaaccgaagaccagccgtggcgccagcgattggaagacgagcctcgatcggcagctggaattttatcagtggctgcaatctgcggagggggcgatcgccggcggcgcgaccagcagttggaatgggcagtatgcagcgtatccggcgggcgctgcgacctttcatggaatggcctacgaatcggatccggtctatcacgatccgggttccaatacctggtttggctggcaggcctggtcgatgcaaagagtcgccgagtattatcagaccgcaggggatccacgggcagcgatcctcctcgataaatgggcgccttgggtgcagaaaactgtgcgcctcttgccgggcggtgattacgaaatccctgcgactctgagttggagcggacagcccggtggcgatttgcacgtcaccgtcgtcgatttcaatcaggatctcggcattgccgcaggtgtcgcccggacccttctggcctatgccaacggtcagaagatctggggtgcagccgtcaacagcgcagcccagcagcttgctacggaactgctcacccgcatctggaatctcaatgctgatgcggctggtctgtccgcccccgaagtgcggaaggactatgcgcgcttctacgatgcggtttatattccatcgaactatcagggtaagatggcagatggcgcctcagtgaacagccaggcgacctttctcagtctaagaccccggtatcggcaggatcccgatttcgagctgatcgaaagctttaaagccggcggccccgcaccgaccttccgctatcacaggttctgggcgcaggtggaagcggccatggcctttgccgagtatgatcgcctttcgcatcagtag

SEQ ID NO: 98 - protein, 696 aa, Unknown
  Obtained from environmental sample
  SIGNAL (1)...(31)
MILNRWRPRSACAMKWGSLIVAAFVSTGAIGAPANGTGGVAVRVNNEQWPAANAEMPTVTTTAEGFRIVTASGRTIEVPSEQPWRDRFLTIWWKLHDPRLGYFSDFNLPYHAKETLIVEAPDYGHVTTSETFSYWAWLEAMYAHYTGDFAPLRYVYDRIERYAIPTFQPTVAAYNPQSPATFARENPLPNQYPSPLESTVSVGQDPLAAELKGAYGDSIYGMHWLLDTSNWYGYGKGFEPTFINTFQRGPQESVWETVPHPSIEDFRFGAPNQGFLSLFTQDSSYKRQWRYTNAPDADARLIQATWLARNVARDWNVNLSDLNAKAAKMGDFLRYAMFDKYFKALSCQQLGCAPGQGYESAHYLLAWYYSWGGSHPDDAFAKWSWRIGASAAHFGYQNPLAAYILSQDAEFKPKTSRGASDWKTSLDRQLEFYQWLQSAEGAIAGGATSSWNGQYAAYPAGAATFHGMAYESDPVYHDPGSNTWFGWQAWSMQRVAEYYQTAGDPRAAILLDKWAPWVQKTVRLLPGGDYEIPATLSWSGQPGGDLHVTVVDFNQDLGIAAGVARTLLAYANGQKIWGAAVNSAAQQLATELLTRIWNLNADAAGLSAPEVRKDYARFYDAVYIPSNYQGKMADGASVNSQATFLSLRPRYRQDPDFELIESFKAGGPAPTFRYHRFWAQVEAAMAFAEYDRLSHQ

SEQ ID NO: 99 - DNA, 1935 bp, Unknown
  Obtained from environmental sample
atgaagtctgttctgtttattctcctcgtcggatgtgtgttgcaacacatccatgctggtgtttacacccaacgtttcttggaccagtacaataagatcaagaaccgtgccaatggatatttctcttcggacggtgttccatatcactccattgaaactctgatggtagaagctcctgaccatggccacgaaaccacctctgaagccttcagttactacgtttggttagaggccgtgtacggtggaattgctggtgacttccaaccgttcaaccaagcttgggatgtactggagaaatatatcattcccacgcacagtgaccagcccactaacagcaattacaatcctagcagtccagcaacatatgctgctgagttggacaatcccaacaattatccatctccaattgactccagcgttcctgtaggacaggatccgattgccaacgagctgagacaagcttacggaactgatgatatttacggcatgcactggcttttggacgtcgacaatatttacggttttggtgatgctccaggagtatgcgaaggtggaccaaacactcgaggaccatcctacatcaacactttccagagaggacctgaggagtccgtatggagaaccattccacaaccaacttgcgatcagttcaaatacggaggtcaaaatggattcttagatctgtttattaaagataacaattacgcccagcaatggaaattcaccgatgcccctgatgctgatgcccgtgccattcaggcagctttctgggcttcacgatatgctagttcagctggaaaactttctcaaatccaacaaactctagacaaggctgcgaagatgggcgattacttgagatattctctctttgacaaatacttcaagagaatcggtcaatgcgttggagcacagagttgccaaggtgctagcggcaaagacagcgctcattacttgctgtcctggtactacgcatggggaggttctacctcaaccaacggcggttgggcctggcgtattggagatggagcagctcacttcggttaccagaacccattagctgcctatgccctagccaatgaaccttctctaagacccaaaggatccagtgctgtccaagattggaagacatctctgcaaaggcagttagaattctaccaatacttacaatctcctgagggagccttcgccggtggcgcaaccaacagctggaatggccgatacgatactccaagtagcaacttgacacagagcactttccacggtatgttctacgactgggaacccgtatatcacgacccaccttcaaacagatggtacggtatgcagccctggtctgtggatcgtttagcagaatattattacgtcaccggcgacaacaccgccaaaacgcttttggacaaatgggtatcctgggtgctctctgccagtactatcaccagcagcagctaccaagttcccgatcgtctagaatggaacggtgtacctgcatccggaaatggtgtacacgtgaatattgccagctactccaacgacgtcggtacggcttcagcaactgctagaactctagcgtactatgctgctaaatcaaacaacgctcaggctaagaccgccgccaagaatctattagatgtaatatggacacatcaaacaagcaagggagtatccgttgaggaaccacgtgaagattacaaccgcttcaatgagcccgtatacgtcccatcaggctggagaggcacctaccccaacggtgatgtaatccaacaaggctctactttcctcagcatcagatctttctacaaaaacgaccccgacttccagaaagttcagagttacttgaacggtggaccggtgccaacattcacataccatcgtttctgggcacaatccgaggttgccatcgcaaacggagcttatggacttctcttcaacgaataa

SEQ ID NO: 100 - protein, 644 aa, Unknown
  Obtained from environmental sample
MKSVLFILLVGCVLQHIHAGVYTQRFLDQYNKIKNRANGYFSSDGVPYHSIETLMVEAPDHGHETTSEAFSYYVWLEAVYGGIAGDFQPFNQAWDVLEKYIIPTHSDQPTNSNYNPSSPATYAAELDNPNNYPSPIDSSVPVGQDPIANELRQAYGTDDIYGMHWLLDVDNIYGFGDAPGVCEGGPNTRGPSYINTFQRGPEESVWRTIPQPTCDQFKYGGQNGFLDLFIKDNNYAQQWKFTDAPDADARAIQAAFWASRYASSAGKLSQIQQTLDKAAKMGDYLRYSLFDKYFKRIGQCVGAQSCQGASGKDSAHYLLSWYYAWGGSTSTNGGWAWRIGDGAAHFGYQNPLAAYALANEPSLRPKGSSAVQDWKTSLQRQLEFYQYLQSPEGAFAGGATNSWNGRYDTPSSNLTQSTFHGMFYDWEPVYHDPPSNRWYGMQPWSVDRLAEYYYVTGDNTAKTLLDKWVSWVLSASTITSSSYQVPDRLEWNGVPASGNGVHVNIASYSNDVGTASATARTLAYYAAKSNNAQAKTAAKNLLDVIWTHQTSKGVSVEEPREDYNRFNEPVYVPSGWRGTYPNGDVIQQGSTFLSIRSFYKNDPDFQKVQSYLNGGPVPTFTYHRFWAQSEVAIANGAYGLLFNE

SEQ ID NO: 101 - DNA, 1935 bp, Unknown
  Obtained from environmental sample
atgaagtctgttctgtttattctcctcgtcggatgtgtgttgcaacacatccatgctggtgtttacacccaacgtttcttggaccagtacaataagatcaagaaccgtgccaatggatatttctcttcggacggtgttccatatcactccattgaaactctgatggtagaagctcctgaccatggccacgaaaccacctctgaagccttcagttactacgtttggttagaggccgtgtacggtggaattgctggtgacttccaaccgttcaaccaagcttgggatgtactggagaaatatatcattcccacgcacagtgaccagcccactaacagcaattacaatcctagcagtccagcaacatatgctgctgagttggacaatcccaacaattatccatctccaattgactccagcgttcctgtaggacaggatccgattgccaacgagctgagacaagcttacggaactgatgatatttacggcatgcactggcttttggacgtcgacaatatttacggttttggtgatgctccaggagtatgcgaaggtggaccaaacactcgaggaccatcctacatcaacactttccagagaggacctgaggagtccgtatggagaaccattccacaaccaacttgcgatcagttcaaatacggaggtcaaaatggattcttagatctgtttattaaagataacaattacgcccagcaatggaaattcaccgatgcccctgatgctgatgcccgtgccattcaggcagctttctgggcttcacgatatgctagttcagctggaaaactttctcaaatccaacaaactctagacaaggctgcgaagatgggcgattacttgagatattctctctttgacaaatacttcaagagaatcggtcaatgcgttggagcacagagttgccaaggtgctagcggcaaagacagcgctcattacttgctgtcctggtactacgcatggggaggttctacctcaaccaacggcggttgggcctggcgtattggagatggagcagctcacttcggttaccagaacccattagctgcctatgccctagccaatgaaccttctctaagacccaaaggatccagtgctgtccaagattggaagacatctctgcaaaggcagttagaattctaccaatacttacaatctcctgagggagccttcgccggtggcgcaaccaacagctggaatggccgatacgatactccaagtagcaacttgacacagagcactttccacggtatgttctacgactgggaacccgtatatcacgacccaccatcaaacagatggtacggtatgcagccctggtctgtggatcgtttagcagaatattattacgtcaccggcgacaacaccgccaaaacgcttttggacaaatgggtatcctgggtgctctctgccagtactatcaccagcagcagctaccaagttcccgatcgtctagaatggaacggtgtaccttcatccggaaatggtgtacacgtgaatattgccagctactccaacgacgtcggtacggcttcagcaactgctagaactctagcgtactatgctgctaaatcaaacaacgctcaggctaagaccgccgccaagaatctattagatgtaatatggacacatcaaacaagcaagggagtatccgttgaggaaccacgtgaagattacaaccgcttcaatgagcccgtatacgtcccatcaggctggagaggcacctaccccaacggtgatgtaatccaacaaggctctactttcctcagcatcagatctttctacaaaaacgaccccgacttccagaaagttcagagttacttgaacggtggaccggtgccaacattcacataccatcgtttctgggcacaatccgaggttgccatcgcaaacggagcttatggacttctcttcaacgaataa

SEQ ID NO: 102 - protein, 644 aa, Unknown
  Obtained from environmental sample
MKSVLFILLVGCVLQHIHAGVYTQRFLDQYNKIKNRANGYFSSDGVPYHSIETLMVEAPDHGHETTSEAFSYYVWLEAVYGGIAGDFQPFNQAWDVLEKYIIPTHSDQPTNSNYNPSSPATYAAELDNPNNYPSPIDSSVPVGQDPIANELRQAYGTDDIYGMHWLLDVDNIYGFGDAPGVCEGGPNTRGPSYINTFQRGPEESVWRTIPQPTCDQFKYGGQNGFLDLFIKDNNYAQQWKFTDAPDADARAIQAAFWASRYASSAGKLSQIQQTLDKAAKMGDYLRYSLFDKYFKRIGQCVGAQSCQGASGKDSAHYLLSWYYAWGGSTSTNGGWAWRIGDGAAHFGYQNPLAAYALANEPSLRPKGSSAVQDWKTSLQRQLEFYQYLQSPEGAFAGGATNSWNGRYDTPSSNLTQSTFHGMFYDWEPVYHDPPSNRWYGMQPWSVDRLAEYYYVTGDNTAKTLLDKWVSWVLSASTITSSSYQVPDRLEWNGVPSSGNGVHVNIASYSNDVGTASATARTLAYYAAKSNNAQAKTAAKNLLDVIWTHQTSKGVSVEEPREDYNRFNEPVYVPSGWRGTYPNGDVIQQGSTFLSIRSFYKNDPDFQKVQSYLNGGPVPTFTYHRFWAQSEVAIANGAYGLLFNE

SEQ ID NO: 103 - DNA, 2010 bp, Unknown
  Obtained from environmental sample
atggctaaaaggttctcgttgattgggatagggttggttctcgccttgggtttggcggggggcgtttgggcggagaaatccgcgtcgctgtttttcccgctgcccgcgcccgcggacgcgatgccggcgggatcgcccgtggcgacccacggcaaactttcggtgtcaggcagcaaaatcgtcgacaaaagcggtacggcggtgcagctcaaaggtatgagcttcttttggagcaactccggagtaggcggaatcttctacaacgagaaggtaatctcgtggctcgcccacgattggaaggtggatgtcctgcgtgtggccatgggcgcggagacggacggcacgaacaagggttactcggacggggataaagccactcaggagctgttggcgagggccgcgattgaggagtgcataaaaagaggagtctacgtgattattgattttcactcccacaaagagcatcgctccgaagcggttacgttctttaaggatatggcgacctcctacggcaagtacccgcatgtattgtatgaaatttggaatgagcctttggatgccggcggtggaaacggcgtttcgggcggtacgatagcggattacgcgagtaccgtgggatccgccatcaggaacaccaacggagccgaaggcatcattattgtcggttcgccccggtggagttcgcagcctggcagcgtgaatgtttccggggttacaaacgtggcctattctatgcacttctacgcggccgaacacagagacagttatcgcaatgatatgacctccgcggcctcgagcaaagcgatattcgccacggaatggggcacgaccaacgctaaagccaagggcggcattgataaaacggagtcagataagtggatcagcgaaatggataaaaacaagatcggatgggcaaattggtcaatctcgtcacaaacgaaagacaatgacgacgccacctccatattatcgggcggcggaacgcaaggcggctggtcggacaacgattttaccgaatccggcaagtatatccgaggaaaattccctaagggcaacggcacctacaaagttaccgtaacgcagcccgccgccggcggtaaaatagacgtgtcaaagctcaagagcagttacgggtggggcgagtcgcttgaactcacggccgttcctaacgacggctgggagattaagacttggacgggaaacgcgacaggcaattcgccttccctaaaaggccttttctacgcgctgaacccgaacatctccgccgagttctacgagtgcggcgtaatcaagaacggtcatttcacctacgacgcggtcggctgggtgcaggtcgccgataacggcgctaaaacgaacccgatgtcggtcgctaactcggagcttgtggtcgacgtgacgaccgccggcgcgagcgtttgggatgtgagggtcggcaacagcgccactacgggtatgcttgccgccgaccaccaatacgagctgaagtttaaagcgcgcagcgccgcggcgagggacatttacgtgagactgtcaagcagcaactacatctccatttacggcgatacgcttaaggcgagcctgaccaccaccgcgcaaacgttcacgcataagtttaccgttaggcgcggcgccgctatacaaggcggggcggtcggattcttcggcggcgacaagacgggcaagtggtacataagcgaggtgagcctcaaagacttgggctccgtgggcggaaacgtgggcgtttcgcgtccggcggcgtcggccgtccgtacgtcgtgggctgtcgttaagagcggctcgggagtgcagttgcgcggtcccgcggagaacggcgccgagatttccatatacgacacacgcggtaaactggtcaggagcttggcggcggtcgacggcctgaatcttagctccggcatcgtaaacgccccggcgggcaactacctgctggtcgtcaggaataacgcgggcgcggagatctataagacgatgtttacgatgacgcggtaa

SEQ ID NO: 104 - protein, 669 aa, Unknown
  Obtained from environmental sample
MAKRFSLIGIGLVLALGLAGGVWAEKSASLFFPLPAPADAMPAGSPVATHGKLSVSGSKIVDKSGTAVQLKGMSFFWSNSGVGGIFYNEKVISWLAHDWKVDVLRVAMGAETDGTNKGYSDGDKATQELLARAAIEECIKRGVYVIIDFHSHKEHRSEAVTFFKDMATSYGKYPHVLYEIWNEPLDAGGGNGVSGGTIADYASTVGSAIRNTNGAEGIIIVGSPRWSSQPGSVNVSGVTNVAYSMHFYAAEHRDSYRNDMTSAASSKAIFATEWGTTNAKAKGGIDKTESDKWISEMDKNKIGWANWSISSQTKDNDDATSILSGGGTQGGWSDNDFTESGKYIRGKFPKGNGTYKVTVTQPAAGGKIDVSKLKSSYGWGESLELTAVPNDGWEIKTWTGNATGNSPSLKGLFYALNPNISAEFYECGVIKNGHFTYDAVGWVQVADNGAKTNPMSVANSELVVDVTTAGASVWDVRVGNSATTGMLAADHQYELKFKARSAAARDIYVRLSSSNYISIYGDTLKASLTTTAQTFTHKFTVRRGAAIQGGAVGFFGGDKTGKWYISEVSLKDLGSVGGNVGVSRPAASAVRTSWAVVKSGSGVQLRGPAENGAEISIYDTRGKLVRSLAAVDGLNLSSGIVNAPAGNYLLVVRNNAGAEIYKTMFTMTR

SEQ ID NO: 105 - DNA, 1005 bp, Unknown
  Obtained from environmental sample
gtggcaaatatcaaagtcggctggaatttaggtaacacgcttgacgcggttaagtttggttcggatctgactgtttctgatcttgaaacagcatggggaaatcctgttactacaacaggacatatcacggcaataaaaaacgcaggctttaacgcgattcgaattcccgtttcgtgggcaaaatgcgccgatgccgattttaatattcgcgcggattggatggagagagttacccaagtggtcaattacgcggttgaaaacgatatgtatattttgcttaacacccaccatgatgagagcatatttaaatttacaaacaaagaaaaagacgcgtcaataaacgcgttcagaaaaatatggatgcagatcgccgttaatttccaaaattacgatgaaaaactaatttttgaaggattaaacgagccaagaacaagaggcagttcggctgaatggaacggtggaacctctgcagaacgcgccaatctgaatgaccattatgcggtttttgtaaaaacagtgcgcgcctgcggcggaaataacaacaagcgttttctggtgatcaatacctatgctgcttccggcgaggcagtggcgatgagcggcttaaagattccggcggataccgcgcaaaacaaaatcatcgcgtcttaccacgcttatgagccatactattttgctttacatgaaggtagtaattcggtaaagacatggagtcagagtaaattatcggacactactcctattacaagccggattgctcaagcaaattctacttttatcaacaagggcatacctgtcataatcggtgaattcggcgcccttaatagagacaatgaaccggcaagagccgcgtgggttgaattttacgtgaaatccgcggcggcaaaaggtattaagtgcttctggtgggatgacggcggtaattttaaattatacgacaggagaaacgatacattttattttccgcaaataagagacgggttaataaagggcgcgggtaactaa

SEQ ID NO: 106 - protein, 334 aa, Unknown
  Obtained from environmental sample
  DOMAIN (11)...(313): Cellulase (glycosyl hydrolase family 5)
MANIKVGWNLGNTLDAVKFGSDLTVSDLETAWGNPVTTTGHITAIKNAGFNAIRIPVSWAKCADADFNIRADWMERVTQVVNYAVENDMYILLNTHHDESIFKFTNKEKDASINAFRKIWMQIAVNFQNYDEKLIFEGLNEPRTRGSSAEWNGGTSAERANLNDHYAVFVKTVRACGGNNNKRFLVINTYAASGEAVAMSGLKIPADTAQNKIIASYHAYEPYYFALHEGSNSVKTWSQSKLSDTTPITSRIAQANSTFINKGIPVIIGEFGALNRDNEPARAAWVEFYVKSAAAKGIKCFWWDDGGNFKLYDRRNDTFYFPQIRDGLIKGAGN

SEQ ID NO: 107 - DNA, 1647 bp, Unknown
  Obtained from environmental sample
atgaaaaggatgtcatttgctgtttcgttgttcacattcttatttgccgtcagcgcgtactcgcagaacggcgtaactacacgttattgggatgcttgcaagccaagttgcggatggaccagcaacgcttccggcagccccaacggtgtttgcaaaagctgtaatataaccggtggggtagaatccagtaacgactcacggagcgcgtgcgaaaacggccctgcttttacgtgtatgaagcaggctccgtgggcagtggacgacaacatgtcatacggttttgtcgccaacaataaggtcggttgcggcaagtgcgtggagtttacgtttacaaatacgactatcagcgggaaaaaaatgactgtcatggtaagcaacttcggtaacctcggcggagacgcccattttgacatcatgattcctgggggcggcgtgggtgattttgacgcccttactaggcagattcagcagaatggcggttccagtgcggatatgggcgtgagatatggcggttttagagccaagtgcggcgccgatgcggcttgtataaggaaaatgtgcgacgcggctttcggcacggctgctcttgcggacttgaaagccggttgctattggtacatagactggttcaagatggccgataaccctaacgtttcttataaggaagtcacttgtccgcaagcgttggtcgataagtacaagggcaatttcaattctacgcctaacccgccgcctaacacaacctacacgctcacagtcaaccgcaacccgaccaacggcggaaccaccactccggcgagcagccagtccaatattaacggcggatcgcaggtcaacatatcggccacggcggcgagcggctacacgttcaccaattggacggtatccggtagcggcacaatcgccaacgcgaacaacgcatccacaaccgtcacagtaaacgggaacatcaccgttacggccaacttcaataacagcgctaacccccccgtacccgtaaaaggcgacaccataaaggttgaggcggagaatttctcgagtaaatccggcgacaatataaaggttgaagacggcgcaatcggctggatcgaaaacggaaactcgacgacctacaaggtgaacgtcggaaaggccggaacggccaccatgctattccggatcgcaaccgaagttcagagcaatttttcggtggaagtgaacggcacgaatgtcgggaggatttcccaaggcagcaccggcggttggggtaccttcataaccgtgcagctcagcaacgccgtaaccctcagagccggagaaaacacgataacgctcaaattcgagtccgccgtaaatgtcgattatttcttgctgataggcgatatcaagggcggcacgtccgtcaggcaacccggcgtgaaagcggtttccgagcgctcccaagtgacgctgaaggccaacgtaagaggcttcaacgcactcttgccggcaaatcacggcttcacctcttacagcgtgatcgacctgcagggcagagaggtaaggtccggcagaatcggcgagtccgcaaccggcctgagcgtaagcggtctgaaacacagcgtggtgttcctaagactggaagggaaaggccggacgccgctgtcgctgaaggctgtgacatattga

SEQ ID NO: 108 - protein, 548 aa, Unknown
  Obtained from environmental sample
  SIGNAL (1)...(21)
MKRMSFAVSLFTFLFAVSAYSQNGVTTRYWDACKPSCGWTSNASGSPNGVCKSCNITGGVESSNDSRSACENGPAFTCMKQAPWAVDDNMSYGFVANNKVGCGKCVEFTFTNTTISGKKMTVMVSNFGNLGGDAHFDIMIPGGGVGDFDALTRQIQQNGGSSADMGVRYGGFRAKCGADAACIRKMCDAAFGTAALADLKAGCYWYIDWFKMADNPNVSYKEVTCPQALVDKYKGNFNSTPNPPPNTTYTLTVNRNPTNGGTTTPASSQSNINGGSQVNISATAASGYTFTNWTVSGSGTIANANNASTTVTVNGNITVTANFNNSANPPVPVKGDTIKVEAENFSSKSGDNIKVEDGAIGWIENGNSTTYKVNVGKAGTATMLFRIATEVQSNFSVEVNGTNVGRISQGSTGGWGTFITVQLSNAVTLRAGENTITLKFESAVNVDYFLLIGDIKGGTSVRQPGVKAVSERSQVTLKANVRGFNALLPANHGFTSYSVIDLQGREVRSGRIGESATGLSVSGLKHSVVFLRLEGKGRTPLSLKAVTY

SEQ ID NO: 109 - DNA, 1473 bp, Unknown
  Obtained from environmental sample
atgggagcggacgtgatacggcttcctatccgtatgcacagcatgacaggcggctctcccgattatacgattgatccgctgttgtttaaatttctggacatggctgtaaattgggcggaaaagtacgaaatatatatcataatagacaaccattcgtttgatcctgtaaaaaacacggaaaacaatatcgacaaaatcttaattcctgtttgggagcaaatcgcgcgccgttacaaagatcgaagcaattatataatttatgaaatcttaaacgagccgcacgggataagcgactcaagatggggagaagtacaggggcttgcgatagacgcaatccgtaggcatgataccaaacattttattattgtgggcggcaccgaatacaattctatcggaaaactttcttcaattccggcttataaagatgataaaatcatctgcacttttcatttttatgatccgtatctttttacccatcagggcgcgagctggggcgggccgcctttattgacaactcttgccggagttccctttccgtacgacagcaagcgtatgcctaaagtatcttcacagctaagtggaacatggatagaaagttctttgaaaaatgattacaaaagggcgtccgatccaaagacgctttacagcacattggacaaggcggtttcattttccagagagcgtaatgttcctgttttttgcggcgaattcggcgtgtatatgattaacagcctgaacgaagatcgcgtcaggtggtatgagatagttacaacagccattgccagacgtaatatttcaaggacaagctgggattattacggaggtttcggcgtctttaattcagaaagcggcggggatttttacgcggatttaaatactgacgtggtacgcgcaatggggtttacgccgcccgtccagactccgcgccggcaggaaccgcttagaaaaagcattacaatttatgacgattatcctgacagggaaatttcatgcgggtattgggacgaaacaactgattttagcttatatgacgccaatgccgccgcgggagaattttcgataagatggggaaacgccaaacaatataatattttttattttgcgtttaacaatggcgctaatttaagcgaaatcgcggacaaaggaattcttgaattaaaagcgcgcgctgaaaagcctgttaattttgatatacgctttgtaaatcctgaaaacctaaattcaattccctggcggatgcgttatacgattaatgaaaagatactcccgcccgacggcaagtggcacacaatacgtataccgcttaaaaaaatggaagacatgggagcgtggttaaatacaacgcagaaatggcttccttcgcagaataaattttcatggagcaatataaagcaattggaaattgtcgctgaacacggggacatgaagggcatttgcatccggtttgacgatataaaattacttgttccctaa

SEQ ID NO: 110 - protein, 490 aa, Unknown
  Obtained from environmental sample
  DOMAIN (1)...(280): Cellulase (glycosyl hydrolase family 5)
MGADVIRLPIRMHSMTGGSPDYTIDPLLFKFLDMAVNWAEKYEIYIIIDNHSFDPVKNTENNIDKILIPVWEQIARRYKDRSNYIIYEILNEPHGISDSRWGEVQGLAIDAIRRHDTKHFIIVGGTEYNSIGKLSSIPAYKDDKIICTFHFYDPYLFTHQGASWGGPPLLTTLAGVPFPYDSKRMPKVSSQLSGTWIESSLKNDYKRASDPKTLYSTLDKAVSFSRERNVPVFCGEFGVYMINSLNEDRVRWYEIVTTAIARRNISRTSWDYYGGFGVFNSESGGDFYADLNTDVVRAMGFTPPVQTPRRQEPLRKSITIYDDYPDREISCGYWDETTDFSLYDANAAAGEFSIRWGNAKQYNIFYFAFNNGANLSEIADKGILELKARAEKPVNFDIRFVNPENLNSIPWRMRYTINEKILPPDGKWHTIRIPLKKMEDMGAWLNTTQKWLPSQNKFSWSNIKQLEIVAEHGDMKGICIRFDDIKLLVP

SEQ ID NO: 111 - DNA, 1335 bp, Unknown
  Obtained from environmental sample
atgaccgcttttgataacgcaatcagcgcggcgaaaagcgcgctcgcctcggcagcgactcaaggggcgttggattcggcggtaaccgccctgcaatccgcgattacaacttttagcggcgcgcggcagcaaggcactaaagaaggcggtggcacacaaaatttcagggacataacggccgcgcaattagccgctgaaataaaaatcggctggaatttgggcaacacgcttgacgcttacaacttaacgtggcttggcgcaaacccaacggttaaccaaatggaaacagcgtggggtgttcccactacgacaaaggcaaatattaccgcgttaaaaaacgccggctttaacgctatcagaattcccgtatcctggacaaaggccgcgagcggagcgccgaattacaccatacgcgccgactggatggcgagggttaaggaaattgtcaattacgccgtagacaacgatatgtatatcattttaaacacccaccatgacgaagacgtgctcacatttatgaattcaaacgcggcggcgggaaaagcggctttccagaaactctgggagcagattgccgctgccttcaaggactacaacgaaaaactgatctttgagggattgaacgaaccaagaacccccggcagttccagtgaatggaacggcggcactgccgaagaacgcgccaatttgaattcctattaccccatcttcgttaatacggtaagaaactcaggcggtaataacggcaagcgcgtattgatgattaacgcctatgcagcttccgctgaagcggtcgcaatgaacgcgttaacgctccctacagacagcgcggtaaataaacttattgtttctttccattcttacagtccctataattttgctctgaataaagactccccaataaatacgtggagcagcgacaattccgcggatacttcgccaattaccggcccgattgaccggtattatactaaatttataagtcagggcattcccgtaataatcggcgaatttggcgccatgaataaaagcaatgaagctgtcagggcgcaatgggccgaatattatattagttatgcctggagtaaaggcattaaatgtttttggtgggataacggcgttacaagcggcgacggcgaaaaatttggcctgcttaacaggcagaacaatacttttacatataacgctttacttaacggtatgatgagtgggacaggcggcgctggtccaaacccgccgactcctctggttacgccaaccccgccaactactattaccggaaatttaggtacctaccaatttggtacacaggaagacggcgtttctcccaactaa

SEQ ID NO: 112 - protein, 444 aa, Unknown
  Obtained from environmental sample
MTAFDNAISAAKSALASAATQGALDSAVTALQSAITTFSGARQQGTKEGGGTQNFRDITAAQLAAEIKIGWNLGNTLDAYNLTWLGANPTVNQMETAWGVPTTTKANITALKNAGFNAIRIPVSWTKAASGAPNYTIRADWMARVKEIVNYAVDNDMYIILNTHHDEDVLTFMNSNAAAGKAAFQKLWEQIAAAFKDYNEKLIFEGLNEPRTPGSSSEWNGGTAEERANLNSYYPIFVNTVRNSGGNNGKRVLMINAYAASAEAVAMNALTLPTDSAVNKLIVSFHSYSPYNFALNKDSPINTWSSDNSADTSPITGPIDRYYTKFISQGIPVIIGEFGAMNKSNEAVRAQWAEYYISYAWSKGIKCFWWDNGVTSGDGEKFGLLNRQNNTFTYNALLNGMMSGTGGAGPNPPTPLVTPTPPTTITGNLGTYQFGTQEDGVSPN

SEQ ID NO: 113 - DNA, 1116 bp, Unknown
  Obtained from environmental sample
atgaaggataattattttaacgcaggattaaacaatattaataataattctcctgccgcccgattaaccggcaatccggccgtcaaattggtcagcgatattaaagtaggctggaatttaagcgaatctcttgaagccgctcatttgcagcatcttggcgaaaacccggcaatcagtcaaatggaaacagcctggggtaatcctgttacaaccaaaggaaatattaccgctataaaaaacgccggttttaacgcaattaggattcctgtttcatgggacaaggcggctgatcctgattacaatatccgtaaaaactggtttgcaagagttaaggaagttgtaaattatgctgtagataatgacatgtatattattattaatacgcatcatgatgaagatatatttaaatttacaaatgcggaaacaggaaaatcactttcggcattcaaaaaaatatgggaacagattgccgataactttaataattataatgaaaaattaattttcgaggcgttaaacgaaccaagaaccattggagcggcgtgggaatggacaggcggcgttccggaagaacacgcgaatttaaataaatattatcaggtttttgttgatacggtgcgcgcaagcggcggtaataatgacaagcgtatattaatgattaatacttacggcgcttccgccgaatcaacggcggtaaatgctttaactcttccgattgatactataccgaacagtcttattgtttcatttcatgcttatgtacccagagattttattgtctatgacaacccattaaaaacatgggacagttccaatcctaaagatacaaccccgatacacgaagcaatgctgcctttttttaataaatttatcattaaaggaattcctgttataatgggtgaattttgcgctgatgataaaaataatgaatctgaaagggctaaatgggctgagtattatgtcagctatgccagaagcaagggtattccgtgtttttggtggggcggttcgagcaaattatttgacagaagaaacaatacatttcctttcccgcaaattgtaactgctttaatgaatggaataaataatactccctcatactggctgcagaagtaa

SEQ ID NO: 114 - protein, 371 aa, Unknown
  Obtained from environmental sample
MKDNYFNAGLNNINNNSPAARLTGNPAVKLVSDIKVGWNLSESLEAAHLQHLGENPAISQMETAWGNPVTTKGNITAIKNAGFNAIRIPVSWDKAADPDYNIRKNWFARVKEVVNYAVDNDMYIIINTHHDEDIFKFTNAETGKSLSAFKKIWEQIADNFNNYNEKLIFEALNEPRTIGAAWEWTGGVPEEHANLNKYYQVFVDTVRASGGNNDKRILMINTYGASAESTAVNALTLPIDTIPNSLIVSFHAYVPRDFIVYDNPLKTWDSSNPKDTTPIHEAMLPFFNKFIIKGIPVIMGEFCADDKNNESERAKWAEYYVSYARSKGIPCFWWGGSSKLFDRRNNTFPFPQIVTALMNGINNTPSYWLQK

SEQ ID NO: 115 - DNA, 936 bp, Unknown
  Obtained from environmental sample
gtgttggtgctgtatgcgaatggagtgacagcgtcaagcacgagccagttagtgattaaggttagggtacagaatacaggggacagagcgatagaccttggcagggtgaaggtaaggtactggtacacaggagatggagcagatgttgagggattgacggtagcgagcagtttaggcagcaaggtagcagcgaaggtagtgaaggttggagcgacagctggcggagcggacaggtatgtagagataagctttgcaagcggagtagtattgaacgcgggcagcacgaccaacgagataagggtaactgtaagccgtgcgagcggtagttataatcagtcgaatgactattcagtgatgtcggcaacaagctatgtagagaacaggaaggtaacagggtatatagatgatatacttgtatggggtcaggagccatcgagggggataaaggcagcaggtagtacaccgacggtggcaccgagtccgacgccgacaccgacctcaacagtgacacctactccgaccccgacaccaacgccgacaccgacgagcagcagtggattaggggtatatggacagagatttatgtggttatggaacaagatacatgatcctgcgagtgggtattttaaccaggatgggataccatatcattcagtagagacattgatatgcgaggcaccggattatggtcatttgacgacgagcgaggcattttcgtactatgtatggttagaggcagtgtatgggaagttgacgggtgactggagcaaatttaagacagcatgggacacgttggagaagtatatgataccgtcagcggaagaccagccgatgggaggatataatccgagcaagccagcgacatatgcaggagagtgggagacaccggacaagtatccatcgccgttggagtttgatgtaccagttgggcaggat

SEQ ID NO: 116 - protein, 312 aa, Unknown
  Obtained from environmental sample
  DOMAIN (3)...(83): Cellulose binding domain
MLVLYANGVTASSTSQLVIKVRVQNTGDRAIDLGRVKVRYWYTGDGADVEGLTVASSLGSKVAAKVVKVGATAGGADRYVEISFASGVVLNAGSTTNEIRVTVSRASGSYNQSNDYSVMSATSYVENRKVTGYIDDILVWGQEPSRGIKAAGSTPTVAPSPTPTPTSTVTPTPTPTPTPTPTSSSGLGVYGQRFMWLWNKIHDPASGYFNQDGIPYHSVETLICEAPDYGHLTTSEAFSYYVWLEAVYGKLTGDWSKFKTAWDTLEKYMIPSAEDQPMGGYNPSKPATYAGEWETPDKYPSPLEFDVPVGQD

SEQ ID NO: 117 - DNA, 1152 bp, Unknown
  Obtained from environmental sample
atgtcttcaaaaaccgccatgcgatattttacagacgaaggaattacggcaggctggaacctgggtaatactcttgatgctgttaataactggagttataaaagtcctgtagcggaagaggaatgctggggtaacccaaaggccaatcaggcgatatttaacggaattaaagagcggggttttaatattgtccgtataccttgtacctggaccgggcatattggccccgcgcctggttataaagtttcacaagaacggctgcggcgtgctgccgtagtggccggttatgcgagagaagccggtctgaaagcgataataaatttacaccatgatgacggcgaagatttgggcggctggcttttgttggggaatgccgtcgcaagtcaaaataaccttgatcaaataacggacaaatttgaaaaagtatggacacagatagcggaatattttaaggattacggagactggctgatatttgaaagtatgaatgaggtacatgatgaaaactggggctggagccagacttttcaaaataatccgaaattatttattgatatagttaatgggtggaatcagcgttttaccgacgcggtgcgtgcgaccggcggtaataacgcccaacgttttttaatatatccttcttatgcctctaatcctgaatgtaccattcctgacggcaaggtcggtgcggcggaagccggaaaatattttaaactgccgactgacagcgccggtaatggcaggcaaattgttacttttcattattatgattcttccgaatttgatgatagtggagcagccattgattggggcaaacaagaagaaaagaaggccattgatgatctctttggcaaattcaaaacagagtttataaacaaaaatattccggttgttataggagaaataggcagatccagagcatacggatcaatgacgccgcaagaactgacaacatcaacagcggcccggctgagttgggcggattatgcctttaccaaagctaaacagaacgggcttgttcctgtctggtgggataatggaaactataaagacgagcgtgaaaaagatcaattcggcctttttaatcgcaatacaggtaaaccaaattcagatgaaagcgctgcaattattaatgcgattaccggaaaatag

SEQ ID NO: 118 - protein, 383 aa, Unknown
  Obtained from environmental sample
MSSKTAMRYFTDEGITAGWNLGNTLDAVNNWSYKSPVAEEECWGNPKANQAIFNGIKERGFNIVRIPCTWTGHIGPAPGYKVSQERLRRAAVVAGYAREAGLKAIINLHHDDGEDLGGWLLLGNAVASQNNLDQITDKFEKVWTQIAEYFKDYGDWLIFESMNEVHDENWGWSQTFQNNPKLFIDIVNGWNQRFTDAVRATGGNNAQRFLIYPSYASNPECTIPDGKVGAAEAGKYFKLPTDSAGNGRQIVTFHYYDSSEFDDSGAAIDWGKQEEKKAIDDLFGKFKTEFINKNIPVVIGEIGRSRAYGSMTPQELTTSTAARLSWADYAFTKAKQNGLVPVWWDNGNYKDEREKDQFGLFNRNTGKPNSDESAAIINAITGK

SEQ ID NO: 119 - DNA, 1104 bp, Unknown
  Obtained from environmental sample
atgagcgggaaaacagcctttgagtatttcagggatgaaaaactgctgatcggctggaatatcgggaacagtctggacgcgtacatcaacgggcgggcaaacgaaacaggctggggcaaccccagaataaaccaggaactgcttaacggagtcaaaaaggccggtttcgatctagtccgcataccggtgacatggatgggttatataggcccggcgcgggatcaccatatagacgaaacatatcttgcccgtgtcgctgaagtggcgcagatggcccataaggccggcctcaaggcgatcatcaacctgcaccatgacggctcaaccgaaagcgtcggcaaagaaaatggctggctttccataaacaaggctcgcgcaagcaaagaaggctataacgaggtgacgcataaattcgcccgtgtatggaaacaaatagccacatatttcaagaatcacggcgactggctgatatttgaatcaatgaacgaaatccatgacggcaactggggcgaaggaagcgtacagggtacgcaaactgatattctaaatgactggaaccggtattttacggaagtggtgcggggaaccgggggtaataacgcgacccgttatgtggtgatccccgcctacgctactaaaaccaaacacacgctgtcaaattatttctggctgccggaggacagcgcgcccagccggcagattataacctttcattattacgatccttatgaatttggaatagcgggcacgcgatctgaatggggttcagactcggataaaaacagggtcagcatggattttgccccctttaagtcggtgtatgttgaaagcaagtttccggtgatcatcggcgaatgtggcgcggtacggcagttgtatccggatgataaagccaaagaagacaaagcgaggcaaaaccggcttgattacatttcatgggtattcggcaaagcaaaagaaaacggcctggttccaatttattgggacaacgggcttttaagcggcaacggcgaaaaattcggcctttttaaccgtaataacggtcagccgaattcgccggaaagcggagccgtaattaacgcgatgataaaagcggttaaatag

SEQ ID NO: 120 - protein, 367 aa, Unknown
  Obtained from environmental sample
MSGKTAFEYFRDEKLLIGWNIGNSLDAYINGRANETGWGNPRINQELLNGVKKAGFDLVRIPVTWMGYIGPARDHHIDETYLARVAEVAQMAHKAGLKAIINLHHDGSTESVGKENGWLSINKARASKEGYNEVTHKFARVWKQIATYFKNHGDWLIFESMNEIHDGNWGEGSVQGTQTDILNDWNRYFTEVVRGTGGNNATRYVVIPAYATKTKHTLSNYFWLPEDSAPSRQIITFHYYDPYEFGIAGTRSEWGSDSDKNRVSMDFAPFKSVYVESKFPVIIGECGAVRQLYPDDKAKEDKARQNRLDYISWVFGKAKENGLVPIYWDNGLLSGNGEKFGLFNRNNGQPNSPESGAVINAMIKAVK

SEQ ID NO: 121 - DNA, 1047 bp, Unknown
  Obtained from environmental sample
atggagggaagtatgcgagggcggattttgcaggcgcagtttgctgctttaataattttggctggtttcttgctgctctcatgtgaaaacgacaggcttgtctccgtggacaagcggggacggacagtagtagaacgcttcggccagctcagggtggaagggacaaaactgctggccgccgacggaaaacccgtccagttacgggggataagttccgctggtctgcaatacgcggggaaatatgccaacgaagaggtacttcgctggcttcgcgacgattggaatatgcaggtttggcgggccgcgctgtatcttagcgaggggggctacatatcacagcggtcgcttaagtccaaagtggtagattcagtggaagcggcgatcaaacttgggctgtacgtcattatcgactggcatgttcacctggatcgcgacccccggatgtaccagcagtactcaatcgaattttttggcgaaatggcccagcgttacggttcctatcccaacgtactatacgaaatatgcaacgaacctaacgggcaggatgtaacctggagcggggcggtaaagccctacgcggaagcggttatcgccgagatacggaagtacgatccgaacaacataatcattgtgggaacgcccacctggagccaggacgttgataaagcggcggaagacccgattcgaagctccgcaaacataatgtataccctccatttttatgccggaacccacggcgatgaactccggaacaaggcgaaaaccgccattgacaagggcctgccgctctttgttaccgaatgtggcacctcccaggccacaggcggtggcggggtctacgaggaaaagtatttggagtggctttccttccttaaaaaaaaccaaatctcgtgggtaaactggtctttgaccaataagggggaagattcgggaattctggtaatgaacgcggacagggaaggcaaaggcggctggacggataaccagctatcccaatcgggtaaatttatcaggaaaatactccgaaacgaggtaaaagttaaataa

SEQ ID NO: 122 - protein, 348 aa, Unknown
  Obtained from environmental sample
MEGSMRGRILQAQFAALIILAGFLLLSCENDRLVSVDKRGRTVVERFGQLRVEGTKLLAADGKPVQLRGISSAGLQYAGKYANEEVLRWLRDDWNMQVWRAALYLSEGGYISQRSLKSKVVDSVEAAIKLGLYVIIDWHVHLDRDPRMYQQYSIEFFGEMAQRYGSYPNVLYEICNEPNGQDVTWSGAVKPYAEAVIAEIRKYDPNNIIIVGTPTWSQDVDKAAEDPIRSSANIMYTLHFYAGTHGDELRNKAKTAIDKGLPLFVTECGTSQATGGGGVYEEKYLEWLSFLKKNQISWVNWSLTNKGEDSGILVMNADREGKGGWTDNQLSQSGKFIRKILRNEVKVK

SEQ ID NO: 123 - DNA, 1500 bp, Unknown
  Obtained from environmental sample
atgggcgcgtataaccgcaccctgggcgagccctgctgtggcagttattatttattgagggacatacttcgcggcaagtggggctttaagggccatgtggtttcggactgctgggctatacgcgacttccacgaacaccacaagataacggaaacgcccgaagaatctgcggcccttgccctgaactcaggatgcgaccttaactgcggctgtacctacccgatgcttaccgcttccctaaaaaaaggcctggtaaccgaggaggcgatcaacaccgccctaagccgggttttgcgtacccgcttcaagctgggaatgtttgatactgcgggaaagggtaaatacgacgagctcgaccgcaaggtgatcaactgcgagaaacaccggcaacttgccctaaaagcggcggagaaatccatagtcctcctaaagaacgacaagggccttttgcctctggattccagcgctaaaaagatcaccgttgtcggcccgggcgcggccaatgcccatacgctgttcggcaattattacggggtaagttcccgttttgttaccgttcttgaggggttgggggaaaaggtaaaggacaagtacgggatcaatctggaataccgccagggctgtcttatgtacggcgcgaacaacatgtcaaacgccgaattcggccaggcaaacgccgcagacatcattatcgccgtcatgggcctggacggggctattgagggggaggagggcgatgccattgcttcggactccaacggcgaccggacttacattgagcttccaccctggcagattaactttttgcagaaagtccgcaaagcgggcaagccggtaattctggtactgacaggcggcagtcccatcgccataccggaagacattgccgatgcggtgattttcgcctggtatcccggcgagctgggcggcaaagccgtggctgacatcatctttggcgatgttgtcccatcgggaaaactccccatcaccttccccgcgtcaacggaacagcttcccccttacgaggaatattccatgaagggccggacttaccgctacatgacggaaaagcccctgtatccctttggcttcggcctttcctatacaagtttccgtttcgattcgcttgccctttccgcaccgtcaattccggctaccgcctcggcggatgcgtcggtaaaggcgttcgtaaagctgagcaatatcggcaagcgggatgcggaagaagtgatgcagatatacatcacgaaagacgagcgtggagcagacgatcccctgttttcgttgcgggctttcagccgcgtttttgtccctgcgggcaagtctgttacggcggaattcgttcttcccgcctcggcttttgaaacggtgaatgccgaaggggattctgtgcttttacttggctcctacacagtaattgccgcagacgccgcccctgtgccgatttcggtagaaaagggtgcgccctctccggtgcaggccaagataacagtgggctga

SEQ ID NO: 124 - protein, 499 aa, Unknown
  Obtained from environmental sample
MGAYNRTLGEPCCGSYYLLRDILRGKWGFKGHVVSDCWAIRDFHEHHKITETPEESAALALNSGCDLNCGCTYPMLTASLKKGLVTEEAINTALSRVLRTRFKLGMFDTAGKGKYDELDRKVINCEKHRQLALKAAEKSIVLLKNDKGLLPLDSSAKKITVVGPGAANAHTLFGNYYGVSSRFVTVLEGLGEKVKDKYGINLEYRQGCLMYGANNMSNAEFGQANAADIIIAVMGLDGAIEGEEGDAIASDSNGDRTYIELPPWQINFLQKVRKAGKPVILVLTGGSPIAIPEDIADAVIFAWYPGELGGKAVADIIFGDVVPSGKLPITFPASTEQLPPYEEYSMKGRTYRYMTEKPLYPFGFGLSYTSFRFDSLALSAPSIPATASADASVKAFVKLSNIGKRDAEEVMQIYITKDERGADDPLFSLRAFSRVFVPAGKSVTAEFVLPASAFETVNAEGDSVLLLGSYTVIAADAAPVPISVEKGAPSPVQAKITVG

SEQ ID NO: 125 - DNA, 1068 bp, Unknown
  Obtained from environmental sample
atgagccggatgcgcggaataaatataggcggatggttaagccagattgacgctatacaggaaaaagaccccgataaatttccggggatagacaagcacatggaaacatttatcggcgcgggggattttgacaatgtgaaaaattggggctttgatcatgtgcgtatccctgttgactcatacctgttttttaccgaagaagaacagccgcttgaaaacaggtttgttcatcttgataacgccgtaaaatacgctaagcaaaacggccttaaatttatattggacctgcatgagtgtccggggcacgatttttccgaagcggctaaaactcccgttcaaaaacttttctccggcgatgatacctatatcaaaaaaaccgaaaaaatctgggcatatcttgcggagcgttacgcgggcaatgatcatgttctgtttgaaacgcttaatgagcctgtcgcccctgctcctgagatttggaacaatgtaaaggacaggctctgccgcgaaatacgcaaacacgcgcctaaatcaacgataataaccggttccaatatgtggaacgttccgggtacattcaacttccttactccctttgacgacggcaacatgatctactgcgtgcatttttacgagccgcttctttttactcaccagaacgcgccatggatcgataatcctgaaattaaaatcccaagaccgtaccccggcgattacggtcccggtcttgtccgcaaatacggacatgcgcattcggacggcgtttgggataaacagcggcttataaatgaatttacgccggtcaacactttcagaaaaaaatacaacgcgcaggtaatctgtaacgagttcggcgtttatactcccgtcgagcttcaatcccaactgcgctggtatgaggatattctttccgtactcaaagagatggagatcggcttttcatactggaactataaaaacctcgactttggaattatttccataggagagaaactgcacgaaaaccttcctcagtacaacaacagcgaaaggattaatcatcctgttcttgatgtgttaagaagatattga

SEQ ID NO: 126 - protein, 355 aa, Unknown
  Obtained from environmental sample
  DOMAIN (19)...(325): Cellulase (glycosyl hydrolase family 5)
MSRMRGINIGGWLSQIDAIQEKDPDKFPGIDKHMETFIGAGDFDNVKNWGFDHVRIPVDSYLFFTEEEQPLENRFVHLDNAVKYAKQNGLKFILDLHECPGHDFSEAAKTPVQKLFSGDDTYIKKTEKIWAYLAERYAGNDHVLFETLNEPVAPAPEIWNNVKDRLCREIRKHAPKSTIITGSNMWNVPGTFNFLTPFDDGNMIYCVHFYEPLLFTHQNAPWIDNPEIKIPRPYPGDYGPGLVRKYGHAHSDGVWDKQRLINEFTPVNTFRKKYNAQVICNEFGVYTPVELQSQLRWYEDILSVLKEMEIGFSYWNYKNLDFGIISIGEKLHENLPQYNNSERINHPVLDVLRRY

SEQ ID NO: 127 - DNA, 1068 bp, Unknown
  Obtained from environmental sample
atggcacggatgcgcgggataaatataggcggctggttaagccagattgacgctattcaggaaaaagacccggataaatttcccgggatagacaggcatatggaaacttttataggcgcggcggattttgccaatgtaaaaaattggggctttgatcatgtgcgtatcccggttgactcgtacctgttttttaccgaagaagaacagccgcttgaaaacaggtttgttcatcttgataaggccgtagagtacgcaaagcaaaacggccttaagctgatattggacctgcatgagtgtccggggcatgatttttcagaagcggctaaaacgcctgttcaaaagcttttctccggcgacgatacctatatcaaaaaaaccgaaaaaatctgggcttgccttgcggagcgttacgcaggcaatgatcatgttctctttgaaacgcttaacgagcctgtcgcccccgctcctgatatttggaacaatgtaaaagacaggctatgccgcgaaatacgcaaacacgcgcctaagtcaacgataatgaccggttccaacatgtggaacgttccggctacattcggcttccttactccctttgacgacgaaaacatgatctactgcgtgcatttttacgagccgcttctttttacccaccagaacgcgccctggattgataatcctgaaattaaaatcccaagaccgtaccccggcgattacggccccggcattgtccgccaatacgggcatgcgcattcggacggcatttgggacaaacagcggctggtgaatgaatttacccctgtaaacacattcaggaaaaaatacaacgcgcaggtaatctgcaacgagttcggcgtttacacgcccgtcgagcttcaatcccaactgcgctggtatgatgaccttctttcggttcttaaggaaatggagataggtttctcttactggaactataaaaacctcgattttggcattatttccataggggaaaaactgcatgaaaacctgccccagtacaacaacagcgaaaggataaatcatccggttcttgaggtgttaagaaaatattga

SEQ ID NO: 128 - protein, 355 aa, Unknown
  Obtained from environmental sample
  DOMAIN (19)...(325): Cellulase (glycosyl hydrolase family 5)
MARMRGINIGGWLSQIDAIQEKDPDKFPGIDRHMETFIGAADFANVKNWGFDHVRIPVDSYLFFTEEEQPLENRFVHLDKAVEYAKQNGLKLILDLHECPGHDFSEAAKTPVQKLFSGDDTYIKKTEKIWACLAERYAGNDHVLFETLNEPVAPAPDIWNNVKDRLCREIRKHAPKSTIMTGSNMWNVPATFGFLTPFDDENMIYCVHFYEPLLFTHQNAPWIDNPEIKIPRPYPGDYGPGIVRQYGHAHSDGIWDKQRLVNEFTPVNTFRKKYNAQVICNEFGVYTPVELQSQLRWYDDLLSVLKEMEIGFSYWNYKNLDFGIISIGEKLHENLPQYNNSERINHPVLEVLRKY

SEQ ID NO: 129 - DNA, 1641 bp, Unknown
  Obtained from environmental sample
atggcctgcaattcaacaaacacctcaattgaaacccaaacgcctgacgcggtccttaacgcggctcccttttcacgggggataaatttttcacagtggtttgaaactcccaacgcgcagtctattcaatttacccggtttattgagcaggattttatcaacgtgaaaagcatgggggtagacgtgatccggcttccgattagaatgcacagcatgacacggggcgcgcccgaatacgttcttgatccgctgctgctgaaattactggacaccgttgtcgattgggcggaaaaacaccagatgtatttaattattgacaaccattcctttgatcctgtggcgcctaccgatacaaacatagacgggattctcctgaaagtttgggcgcagatcgcgcagcgatataaaaaccgcgggaagtatgttgtttatgagattctcaacgagccccacggcatttccgacagcaggtggggtgaaatccaggggatggcaatagaaacaataaggaaaatcgatacgacgcacgccataattgtcggcggcaccgattacaattccattaataaactgttctctataccggagtattcggatcccaacctcatctatacgtttcatttttacgatccccatttatttacccaccagggcgcctcctggggggagccctcgttagcatcattggccggcgtcccctttccggcggatgtcttacgcatacctaaaactcccgatgatcttaaaggaacatgggttgaaggcgctctaagaaattacaaaaacgacgccgctttttccacactcctgggaagacttgataaaacggtggctttttcaagggaacggaaggctcccgtattttgcggcgaattcggcgtttatatgatccaaagccccgcgaaagaccgggttaaatggtacgaagttgtcgccggcgcgctgggaaggcggaagatcgcccgcgcaagctgggattatttcggcggtttcggcatattcaacaatcagacggggggagatttccactccgatgtcaatgtcgatgttgtccgcgctttaggttttctccctcctccccagcggacgcggattcaaaaaccgctcaattccgggtttaccatgtatggcgattatccgtccaatgatttttcaatggggtactggggtgaagacgccgttttcagcatgtatgataccaacgccgacgaaggggaatacgccatccgctggggaaacgccggtcaatacgacattttctggatcgcgtttgatcggaacggcgatttcagttatctggcggaggcgggatactgccttgaattcagggcaaggacggagaaaccggtaagttttgacgtccgctttgtaaaccctgaaaacgcgtcttccattccctggcgcatgcggtattcgataaatgaaaaaacgctcctccccaacgggaagtggcagaccatccgcgtaccgcttgccaatatgactgaacacggcgcatgggtaaacgcgacgcagtcatggcttggcccgcagggcaaattttcatggaagaatgttaagcagttggagtttgtagccgaagacggcgatctgaaaaatcgtgatatttggtttgattccataagaattatgaagccctga

SEQ ID NO: 130 - protein, 546 aa, Unknown
  Obtained from environmental sample
  DOMAIN (12)...(339): Cellulase (glycosyl hydrolase family 5)
MACNSTNTSIETQTPDAVLNAAPFSRGINFSQWFETPNAQSIQFTRFIEQDFINVKSMGVDVIRLPIRMHSMTRGAPEYVLDPLLLKLLDTVVDWAEKHQMYLIIDNHSFDPVAPTDTNIDGILLKVWAQIAQRYKNRGKYVVYEILNEPHGISDSRWGEIQGMAIETIRKIDTTHAIIVGGTDYNSINKLFSIPEYSDPNLIYTFHFYDPHLFTHQGASWGEPSLASLAGVPFPADVLRIPKTPDDLKGTWVEGALRNYKNDAAFSTLLGRLDKTVAFSRERKAPVFCGEFGVYMIQSPAKDRVKWYEVVAGALGRRKIARASWDYFGGFGIFNNQTGGDFHSDVNVDVVRALGFLPPPQRTRIQKPLNSGFTMYGDYPSNDFSMGYWGEDAVFSMYDTNADEGEYAIRWGNAGQYDIFWIAFDRNGDFSYLAEAGYCLEFRARTEKPVSFDVRFVNPENASSIPWRMRYSINEKTLLPNGKWQTIRVPLANMTEHGAWVNATQSWLGPQGKFSWKNVKQLEFVAEDGDLKNRDIWFDSIRIMKP

SEQ ID NO: 131 - DNA, 1236 bp, Unknown
  Obtained from environmental sample
atgaagaaatttctgctgtgcctgttcttgcctgtcctgctggcagtatcctgcccttcgtcgcctgctgcgcagaaaaaaaagaaggggggcgttgacctgtcctatgcccccgccgtccccgacacggaaaataattatgctctggagccgatgagtgaaaaaacagccttcgattattttcgggatgaaaaactgctggtcggctggaatatcgggaacacactggatgcctatgtcggcggacgggcaagtgaaacggtctggggcaaccccagaataaaccaggacttgcttaacggggttaaaaaagccggttttgatctggtccgcgtccccattacctggatgggctatatcggccccgcgccggattatcacataaacgaaaaatatctggaacgtgtcgccgaagtggtacagatggcgcataatgccggcctcaaggtgatcatcaacctgcaccatgacggttcaaccgaaagcggcggcagggacaacggctggctttcgattaacaaagcccgcgcaagtacggaaggctacgacgaagtaacttttaaatttatccgggtatggaaacaaatagcggtgtattttaaaaattatggcgactggctgatctttgaatcaatgaacgagattcatgacggcaactggggcaataacagcgtacagggtacgcaaaccgacattgtgaatgactggaaccggctttttacccagatcgtgcggggaaccggcgccaataacgccgtccgttatctggtaattcccggctactgtaccaagccccagcatacgctggcaaattatttttggctgccgcctgacagcgttcccgaccggcagattgtaacctttcattattacgacccctatgaatttggaattgccggtacgcgctcagaatggggttcggcggcggataaaaacagagtcgccaatgattttgccccctttaagtcaaaatatatcgacaataatatcccggtgatcatcggcgagaccggcgcggtgcgccagtcttcggatgcggcgcggcaaaaccggcttaattatctttcatgggtattcggcaaagccaaagaaaacggactggttcccatttattgggataacgggcttttcgacggcaatggggaaaaattcgggctctttgaccgcagtaacggccagccgaattcagcggaaagcgacgcctgtatcaaggcgatgacaggagcaattaagtaa

SEQ ID NO: 132 - protein, 411 aa, Unknown
  Obtained from environmental sample
MKKFLLCLFLPVLLAVSCPSSPAAQKKKKGGVDLSYAPAVPDTENNYALEPMSEKTAFDYFRDEKLLVGWNIGNTLDAYVGGRASETVWGNPRINQDLLNGVKKAGFDLVRVPITWMGYIGPAPDYHINEKYLERVAEVVQMAHNAGLKVIINLHHDGSTESGGRDNGWLSINKARASTEGYDEVTFKFIRVWKQIAVYFKNYGDWLIFESMNEIHDGNWGNNSVQGTQTDIVNDWNRLFTQIVRGTGANNAVRYLVIPGYCTKPQHTLANYFWLPPDSVPDRQIVTFHYYDPYEFGIAGTRSEWGSAADKNRVANDFAPFKSKYIDNNIPVIIGETGAVRQSSDAARQNRLNYLSWVFGKAKENGLVPIYWDNGLFDGNGEKFGLFDRSNGQPNSAESDACIKAMTGAIK

SEQ ID NO: 133 - DNA, 1587 bp, Unknown
  Obtained from environmental sample
gtggatactgccaagagtggaacggcaacagtgacagtaagctccggcggcggttcacagactttcaatgacatcacagccgcgcaattagtcgctgatataaaaatcggctggaatctgggcaactcacttgacgctactaacggttttggcgtaaacgcctcggttgaccaaatggaaagaggatggggtaaccccgttacgacaaaggcgatgattaccgcgataaaaaacgccggctttaacgccatcagaattccagtgtcatggacaaaggccgcgggcggagcgccgaattacaccatacgcgccgactggatggcgagggttaaggaaattgtcaattacgccgttgacagtgatatgtatatcattttgaacactcaccatgacgaggacgtgcttacatttatgaattcaaacgcggcggcggggaaggcggcgttccagaaactctgggaacagattgccgacgccttcaaggattacaacgaaaaactgatctttgagggattgaacgaaccaagaacccccggcagttccagcgaatggaacggcggcactgccgaagaacgcgccaacctgaattcctattaccccatttttgttaatacggtaagaaaatcaggcggtaataacggtaagcgcatattgatgataaacccctatgccgcttccatggaagcagtcgcaatgaacgcgttaacgctcccgacggacagcgcggcaaataaacttattgtttctttccactcttatcagccttatgattttgccctgaataaagactccccaaaaaattcgtggagcagcggcagttccggggatacttcgccaattaccggcccgattgaccgctattatactaaattcgtcagtcagggcattcccgtaataatcggcgaattcggcgctatgaataaaaacaatgaagctgtcagggcgcaatgggctgagtattatatcagttacgcgcagaataaaggcattaaatgtttttggtgggataacggcattacaagcggcagcggtgaattatttggcctgcttaacaggcagaacaattcttttacatatcctgctttacttaacggcatgatgagcgggacgggcggaactgttccacccccgccaaatccgccaactccgccaaccccgccgactactattaccggaaatctgggcaactaccaatttggaacacaggaagacggcgtttctcccaactacacacaggctgtatgggtactgtcaggagcgaacttaacaaccgcaaaaacaacgggggcaaaactgacgctggtattatcaacagccccaagcgcttcaacgcactttgtatggcagggaccggccaatggtctctggtggaatgaaaaagaaattcttggcaataccggcaacccaagcacaacgacagttacatgggattcaggcacaaagacccttacaatccccctgtccgctaactctgttaaggattatgacaaatttaccgcccagccatcattgaagatcatcattgcctattacaatggcggagatgttaatgaccttggcatagtcagcgcaaatttgacacaatga

SEQ ID NO: 134 - protein, 528 aa, Unknown
  Obtained from environmental sample
MDTAKSGTATVTVSSGGGSQTFNDITAAQLVADIKIGWNLGNSLDATNGFGVNASVDQMERGWGNPVTTKAMITAIKNAGFNAIRIPVSWTKAAGGAPNYTIRADWMARVKEIVNYAVDSDMYIILNTHHDEDVLTFMNSNAAAGKAAFQKLWEQIADAFKDYNEKLIFEGLNEPRTPGSSSEWNGGTAEERANLNSYYPIFVNTVRKSGGNNGKRILMINPYAASMEAVAMNALTLPTDSAANKLIVSFHSYQPYDFALNKDSPKNSWSSGSSGDTSPITGPIDRYYTKFVSQGIPVIIGEFGAMNKNNEAVRAQWAEYYISYAQNKGIKCFWWDNGITSGSGELFGLLNRQNNSFTYPALLNGMMSGTGGTVPPPPNPPTPPTPPTTITGNLGNYQFGTQEDGVSPNYTQAVWVLSGANLTTAKTTGAKLTLVLSTAPSASTHFVWQGPANGLWWNEKEILGNTGNPSTTTVTWDSGTKTLTIPLSANSVKDYDKFTAQPSLKIIIAYYNGGDVNDLGIVSANLTQ

SEQ ID NO: 135 - DNA, 2184 bp, Unknown
  Obtained from environmental sample
atgttaaagatgaaaaagtttaagaaaataggaatagctttccttgctatttcaatactgctcacctcaatgctttctacagtgagtgtttctgcagccggtactaatgtttatgaagaccgctttttggagctttggggagagcttcataattcttcaaacggatatttcagtcaggagggcgtaccttaccattccatagaaactataatgtgtgaggctcccaattacggacatgagacaacaagtgaagccttcagctactatatatggctggaagcaatgtatggcaagctgtcaggagactggtcaagctacaatacggcatgggatattaccgaaaggtattcgattcccacatcgcaggatcagccaagcatagcaagatataatcccggcagccctgcaacatatgccggtgagtatgagactcccaaccagtatccgagccgtctggattccagtgtttcagtggggacagacccaattaacggagaactgtataacgcatatggctcatacaacatgtatggaatgcactggctctttgatgtagataatttcttcggatatggaaaccgcggagacggtacaagcagagtatcctacataaacacattccaaagaggtcctcaggagggagcttttgaggtagttacgcatccttcatgggaagcatttaaatggggaggtcgcaacggctttttggatctcttcacaatagataacagctacgctcagcaatggcgttacacgatagcctcagacgcagacgcgcgtgccgtacaggctacttactgggcaaataagtgggcgaaggagcagaacaagggatctcaggtagcaaatacagttgcgaaagcaagcaagatgggagactatttacggtattcaatgtttgacaaatatttcaagcctatagggataggcagcggaagtccttctaacacaaaccagcattatttgctgtcatggtattatgcatggggcggagatgcaagctctcaggcttcatgggcatggaaaataggctcaagccacaaccatttcggataccagaaccctatggccgcatggatactgtcaaagaatgcggagtttaagcctaaatctgcaaacggtgcctcagactgggacaagagcttacagagacagcttgaattctatacatggctgcagtcctcagagggagcaatagcaggaggagcaacaaactcacttaacggacgttatgagacatatcctgcgggcacatcaaccttctatggaatggcatatgattgggctcctgtctacctggatcctccgagcaaccagtggattggaatgcagggatggtcaatgcagcgtatagcggagctgtactatgagacaaacaaccagatggcaaagaacctgcttgacaagtggtctgcatggatcataagcgaaacccgcttaaacagcgacggaacctttgaaattccggcaacgcttcaatggacgggacagcctaatacatgggtacccggaagcacaacatggaacaaccctaatcttcatgtaactgttaccgactacggaacagatttgggtattgcaggctctctggcaaacaccttggcattctatgccgcagcaaaggaaaagtatgatacgcctaataatgcggcaaagacagtggcaaaagagctgcttgaccgcatgtggaacctgtacagggatgacaagggcatagcggttgaggaatcccgcgccgactactcccgtatgctcactcaggagatatacattccttcaggctggacaggaaaaatggctgacggaactgtaattcaacccggtatcaagtggatagagctgcacgcaaaaatcaagcaggatcctgactggccgagggttgaggcggcgctccttgcgggacaggctcctaccttcacataccaccgcttctgggcacaggttgatattgctgtagcaaacggtgtttatggaatgcttttccccggagacgcagaggaaaagcttcttggagatgtaaataatgatgggaatataaactcaatagactttgctttattaaaaaaatatttgcttgatcccgattccgcagtaataaacactgtaaatgctgacatgaatgaggacggcaatataaactcaatagactttgcattgctaaagaaatatcttcttgaaaattaa

SEQ ID NO: 136 - protein, 727 aa, Unknown
  Obtained from environmental sample
MLKMKKFKKIGIAFLAISILLTSMLSTVSVSAAGTNVYEDRFLELWGELHNSSNGYFSQEGVPYHSIETIMCEAPNYGHETTSEAFSYYIWLEAMYGKLSGDWSSYNTAWDITERYSIPTSQDQPSIARYNPGSPATYAGEYETPNQYPSRLDSSVSVGTDPINGELYNAYGSYNMYGMHWLFDVDNFFGYGNRGDGTSRVSYINTFQRGPQEGAFEVVTHPSWEAFKWGGRNGFLDLFTIDNSYAQQWRYTIASDADARAVQATYWANKWAKEQNKGSQVANTVAKASKMGDYLRYSMFDKYFKPIGIGSGSPSNTNQHYLLSWYYAWGGDASSQASWAWKIGSSHNHFGYQNPMAAWILSKNAEFKPKSANGASDWDKSLQRQLEFYTWLQSSEGAIAGGATNSLNGRYETYPAGTSTFYGMAYDWAPVYLDPPSNQWIGMQGWSMQRIAELYYETNNQMAKNLLDKWSAWIISETRLNSDGTFEIPATLQWTGQPNTWVPGSTTWNNPNLHVTVTDYGTDLGIAGSLANTLAFYAAAKEKYDTPNNAAKTVAKELLDRMWNLYRDDKGIAVEESRADYSRMLTQEIYIPSGWTGKMADGTVIQPGIKWIELHAKIKQDPDWPRVEAALLAGQAPTFTYHRFWAQVDIAVANGVYGMLFPGDAEEKLLGDVNNDGNINSIDFALLKKYLLDPDSAVINTVNADMNEDGNINSIDFALLKKYLLEN

SEQ ID NO: 137 - DNA, 2916 bp, Unknown
  Obtained from environmental sample
atggctcccagacggagacgtcgcgccgtgcgacggctcttgaccgccgtcacggcggccctcgcgctccccctcacgatgctggccaacggcacgactcccgcccaggcggcggcggtccagtgcagcgtggactacaagaccaacgactggggctccggcttcaccacggatgtcaccatcaccaaccgtggcacggacgccctcaacggctggaccctgacctacgcctactccggcaaccagacgctctccaacggctggaacggcagctggtcccagtcgggcaagaacatcacggtgaagaacgtcgactggaacggaacgatcgccgccggagccgccgtcaccaccggcgcccagttcagttacagcggcacgaacaccgccccgacgagcttcgcggtcaacggtacgacctgtacgggcgcgcaccagccgccgatcgccgtgctgaccagccccgctccgggtgcggtctacagccagggtgaggcggtcccgctcgccgcgaccgcggccgccgccgacaacgcgacggtcagcaaggtcgagttctacgacgacaccacgctgctgggcaccgacaccagtgcgcccttcacgctctcggtctcaagcttgaccgtgggcagtcattcgctggtggccaaggcgtacgacagcctgggcgcgtccgccgcctcgaccccggtcgggatcacggtcgcctccggtcccgccgtggtggcctccccggcccagctcggcgtccagcagggcaagaccggcaccttcggggtgtcgctgtccaagcagccgagctccaatgtgacggtgtccgtggcccgcacggccggcaacaccgggctgtccgtgaccggtgggtcctcgctcaccttcacgccgtccaactggaacaccgcgcagacggtgaccgtcaccgccaacgcgacggggaccggctccgccaccttcaccgcctccgcgaccggctatgccaacgccacggtcacggtgacggaactggcggcctccaaggggtacgacgcccgtttcctggacctctacgggaagatcaccaatccggcgaacggctacttctcgcccgacggcatcccctaccactcggtggagacgctgatcgtggaggcacccgaccacggtcatgagaccacgtcggaggcgtacagctatctcatctggctgcaggccatgtacggcaaggtgacgggcgactggtccaagttcaacggcgcctggggaaccatggagaagtacatgatccccacccacgccgaccagccgaccaactccttctacaccgcttccaaaccggcgacctacgcgccggagctggacacgcccaacgagtacccggcgaagctcgacggcaatgtgtcggtgggctccgacccgatcgcgggtgagctgaagtccgcgtacggcacggacgacatctacgggatgcactggatcgaggacgtcgacaacacctacggctacggcaacacgcccggcggcgggtgcgaggccggcccgacggccaagggtccgtcgtacatcaacaccttccagcgcggtgccgaggagtcggtctgggagaccgtgccgcagccgacctgtgacgccttcaagtacggcggcaccaacggctatctggacctgttcaccggcgactcctcctactccaagcagtggaagttcaccgacgccccggacgccgacgcacgtgccgtgcaggccgcgtactgggccgatgtgtgggccaagtcgcagggcaagggcagcgatgtctcggccaccgtggccaaggcggccaagatgggcgactatctgcgctactcgatgtacgacaagtacttcaagaagatcggcaactgcaccagtacctcctgcccggccggcaccgggaaggacgcctcgcactacctgctctcctggtactacgcctggggcggcgcgacggactcctccgcgggctgggcctggcgcatcggctccagccacacccacgggggctaccagaacccgctggccgcgtacgcgctcagcagctacgccgatctgaagcccaagtcggcgacgggcagcgccgactggagcacctcgctcaagcgccagctggagttctaccagtggctgcagtcgtccgagggcgccatcgcgggcggcgcgaccaacagctggcagggccggtacgccactccgccggccggcacgccgaccttctacggcatgtactacgactggcagcccgtctaccacgacccgccgtcgaaccagtggttcgggttccaggcgtggtcgatggagcgggtcgccgagtactaccagcagaccggggacgcctcggcgaagaaggtcctcgacaagtgggtgaagtgggcgctgtccaagaccacggtcaacccggacggcaccttccagatcccctcgaccctccagtggtcgggtcagcccgacacctggaacgcgtccagccccggagccaacaacgggctgcatgtcaccgtcgcggactacaccgacgacgtgggcgtggcggccgcatacgccaagacgctgacgtactacggcgccaagtccggtgacgcggcggcgaagtcgaccgccaaggcgctgctggacggcatgtggaacaacgaccaggacagcctcggtatcgccgtcccggagacccgcaccgactacagccgcttcggcgacaaggtgtacgtcccgaacggctggagcggcaagatgccgaacggcgacacgatcaactcgtcgtcgaccttctcctcgctgaggtccttctacaagaacgaccccgcctggtcgaagatccagagctatctcgcgggcggcgccgcgcccacgttcacgtaccaccggttctgggcccaggcggacatcgccctcgccatgggctcgtacgcggagctcctcgaataa

SEQ ID NO: 138 - protein, 971 aa, Unknown
  Obtained from environmental sample
MAPRRRRRAVRRLLTAVTAALALPLTMLANGTTPAQAAAVQCSVDYKTNDWGSGFTTDVTITNRGTDALNGWTLTYAYSGNQTLSNGWNGSWSQSGKNITVKNVDWNGTIAAGAAVTTGAQFSYSGTNTAPTSFAVNGTTCTGAHQPPIAVLTSPAPGAVYSQGEAVPLAATAAAADNATVSKVEFYDDTTLLGTDTSAPFTLSVSSLTVGSHSLVAKAYDSLGASAASTPVGITVASGPAVVASPAQLGVQQGKTGTFGVSLSKQPSSNVTVSVARTAGNTGLSVTGGSSLTFTPSNWNTAQTVTVTANATGTGSATFTASATGYANATVTVTELAASKGYDARFLDLYGKITNPANGYFSPDGIPYHSVETLIVEAPDHGHETTSEAYSYLIWLQAMYGKVTGDWSKFNGAWGTMEKYMIPTHADQPTNSFYTASKPATYAPELDTPNEYPAKLDGNVSVGSDPIAGELKSAYGTDDIYGMHWIEDVDNTYGYGNTPGGGCEAGPTAKGPSYINTFQRGAEESVWETVPQPTCDAFKYGGTNGYLDLFTGDSSYSKQWKFTDAPDADARAVQAAYWADVWAKSQGKGSDVSATVAKAAKMGDYLRYSMYDKYFKKIGNCTSTSCPAGTGKDASHYLLSWYYAWGGATDSSAGWAWRIGSSHTHGGYQNPLAAYALSSYADLKPKSATGSADWSTSLKRQLEFYQWLQSSEGAIAGGATNSWQGRYATPPAGTPTFYGMYYDWQPVYHDPPSNQWFGFQAWSMERVAEYYQQTGDASAKKVLDKWVKWALSKTTVNPDGTFQIPSTLQWSGQPDTWNASSPGANNGLHVTVADYTDDVGVAAAYAKTLTYYGAKSGDAAAKSTAKALLDGMWNNDQDSLGIAVPETRTDYSRFGDKVYVPNGWSGKMPNGDTINSSSTFSSLRSFYKNDPAWSKIQSYLAGGAAPTFTYHRFWAQADIALAMGSYAELLE

SEQ ID NO: 139 - DNA, 2916 bp, Unknown
  Obtained from environmental sample
atgcatcccccaccccgcagacgcggtggcgtgcgccgtctcttagcggtcgccgtgaccgctctcgcactgccgctgacgatgctgtcgacgggtaccacccccgcccgggcggcggccgtccagtgcagcgtggactacaggacgaacgactgggggtcgggcttcaccgccgacctgacggtcaccaaccgcggttcggacgtcatcgacggctggaccctgacgtacgactacgcgggcaaccagcgcctggtgaacggctggaacggcagctggtcgcagtccggctccacggtcaccgtgaggaacgccgcgcacaacggccggatcgccgccggcgccgccgtcaccaccggcgcccagttctcctacagcggcaccaacaccgcgcccgcctccttctcggtcaacggcaccgcctgcgtgggcgcccaccagccgcccatcgccgtgctgaccagcccgcaggccggctcggtctattcacagggcgagaccgtgccgctcgaggccacggccgccgcggccgaccaggccaccatcaccaaggtggagttctacgacgacaccgaactgctcggcaccgacacctccgcgccgttcacgctgtcggtcggcggtctggccgtcggcgcccactcgctggtcgccaaggcgtacgacagcctgggcgcctccgcctcctccaccccggtcggcatcacggtcgcctcgggtcccgccgtggtcgcgagcccgtcccaactgggcgtgaagcagggtgagtcgggcacgttcgaggtgaagctgtccaagcagccgagcgagaacgtcaccgtcacgacggcacgggcgagcggcaactcgggtctgtcggtgtcctccggcgcgaccctcaccttcacgccgtccaactggagcacggcgcagcgcgtgaccgtgaccgccgacgcctccggcaccggctccgcggtcttcgagtccacggcgcccggccacgccaaggccgcggtgaccgtgacccagctgggcgcgaccaagtcgtacgaggcccgcttcctcgagctgtacgacaagatcaccgacccggcgaacggctacttctcccccgagggcattccgtaccactcggtcgagacgctgatcgtcgaggcgcccgaccacggccacgagaccacctcggaggcgtacagctacctgctgtggctgcaggccatgtacggcaggatcagcggggactggacgcggttcaacgacgcgtgggagacgatggagcagtacgccatcccgaccgcggcggaccagcccaccacctccttctacgacccctcgaagccggcgacgtacgcccccgagcacgacaccccgaacgagtacccgtcgcagctcgactccggcgtctccgtcggccgtgacccgatcgcggcggaactgaagtcggcgtacggcacggacaacgtgtacggcatgcactggatccaggacgtggacaacgtctacggctacggcaactcgcccggcacgtgcgaggccggaccgtccgacaccggcccgtcctacatcaacaccttccagcgcggtccgcaggagtcggtgtgggagacggtcacccagcccacctgtgacgccttcaagtacggcggcgccaacggctacctggacctgttcacgaaggacgcgtcctacgccaagcagtggaagttcaccaacgcccccgacgccgacgcgcgcgcggtgcaggcggcgtactgggccgacctgtgggcgaaggagcagggcaagggcggtcaggtcgccgggaccgtcgccaaggcggccaagatgggcgactacctgcgctacgcgatgtacgacaagtacttcaagaagatcggcaactgcaccagcacgtcctgcccggccggcaccggcaaggacgcctcgcactacctgctctcctggtactacgcctggggcggcgccaccgacacctcggcgggctggtcctggcgcatcggctccagccacgcgcacggcgggtaccagaacccgctcgccgcatacgcgctcgccaactacgcgccgctgaagccgaagtcggcgacgggcgcgcaggactgggccgagtcctaccagcggcagctggagttctaccgctggctgcagtccgacgagggcgccatcgcgggcggcgcgaccaacagctgggcgggccgctacaccaccccgccgtccggaacgccgaccttctacggcatgtactacgacgagaagccggtgtaccacgacccgccgtcgaaccagtggttcggcttccaggcgtggtcgctggagcgggtggccgaggtgtaccggcagacgggcaacgcgcaggccaaggcggtcctcgacaagtgggtcgactgggcgctgtccgagaccacggtcaacccggacggttcgttcctcttcccgtccacgctgaagtggtccggcaagcccgacacctggaacccgtcgtcgccgggcgccaacagcgggctgcacgtcgaggtcgccgactacaccaacgacgtcggtgtggccggctcctacgccaagatcctgacgtactacgccgcccgctcgggtgacaccgaggcggcggacacggcgaaggcgctgctggacggcatgtgggagaactaccaggacgacctcggcatcgccgtcccggagacccgcaccgactacgagcgcttcgacgacccggtgtacgttccgtccggctggaccggcaccatgccgaacggcgaccggatcgactcctcgtcgacgttcctctcgatccgctccttctacaaggacgacccggcctggtcgaaggtcgagagctatctgaagggcggcgccgcgccggtcttcacgtaccaccggttctgggcccaggcggacatcgccacggccatgggcgcgtacgcggagcttctcgaatag

SEQ ID NO: 140 - protein, 971 aa, Unknown
  Obtained from environmental sample
MHPPPRRRGGVRRLLAVAVTALALPLTMLSTGTTPARAAAVQCSVDYRTNDWGSGFTADLTVTNRGSDVIDGWTLTYDYAGNQRLVNGWNGSWSQSGSTVTVRNAAHNGRIAAGAAVTTGAQFSYSGTNTAPASFSVNGTACVGAHQPPIAVLTSPQAGSVYSQGETVPLEATAAAADQATITKVEFYDDTELLGTDTSAPFTLSVGGLAVGAHSLVAKAYDSLGASASSTPVGITVASGPAVVASPSQLGVKQGESGTFEVKLSKQPSENVTVTTARASGNSGLSVSSGATLTFTPSNWSTAQRVTVTADASGTGSAVFESTAPGHAKAAVTVTQLGATKSYEARFLELYDKITDPANGYFSPEGIPYHSVETLIVEAPDHGHETTSEAYSYLLWLQAMYGRISGDWTRFNDAWETMEQYAIPTAADQPTTSFYDPSKPATYAPEHDTPNEYPSQLDSGVSVGRDPIAAELKSAYGTDNVYGMHWIQDVDNVYGYGNSPGTCEAGPSDTGPSYINTFQRGPQESVWETVTQPTCDAFKYGGANGYLDLFTKDASYAKQWKFTNAPDADARAVQAAYWADLWAKEQGKGGQVAGTVAKAAKMGDYLRYAMYDKYFKKIGNCTSTSCPAGTGKDASHYLLSWYYAWGGATDTSAGWSWRIGSSHAHGGYQNPLAAYALANYAPLKPKSATGAQDWAESYQRQLEFYRWLQSDEGAIAGGATNSWAGRYTTPPSGTPTFYGMYYDEKPVYHDPPSNQWFGFQAWSLERVAEVYRQTGNAQAKAVLDKWVDWALSETTVNPDGSFLFPSTLKWSGKPDTWNPSSPGANSGLHVEVADYTNDVGVAGSYAKILTYYAARSGDTEAADTAKALLDGMWENYQDDLGIAVPETRTDYERFDDPVYVPSGWTGTMPNGDRIDSSSTFLSIRSFYKDDPAWSKVESYLKGGAAPVFTYHRFWAQADIATAMGAYAELLE

SEQ ID NO: 141 - DNA, 1134 bp, Unknown
  Obtained from environmental sample
atgggcggtaaatccgcccttgattatttaaggagcgaaaaagtttatgccggctggaataccggcgacacactggacgcgtggaacggcaaaatcgaccaagacggcaaattggcttttatagaatccggagagatggtttcatggggtaatccgctgttaaatcaggaattgtttaacggattaaaaaccgccggatttagtattgtccgtattccgataacatggatgggatacatagggccagcgcccgattcgcatattagcgaatcgttcttaaagcgtgtcgccgaaataaccggttacgcaaaaaaggccggtcttaaagtgattatcaatttacatcatgacggcgcgacagattcaaaaaaaggagatcagggctggctttccgtcaggcaggcaagcaggagtcaggatgattttaacaggataacaagccaatatgtccgcgtatggaagcaaatcgccgattattttaaaaattacggcgactggcttatatttgaaggttttaatgaacttcacgacggcaactggggatcgggcggccagataggtcaatttattaccataaataagtggaatcaattttttgttgataccgtgcgctcaacgggcggaaacaacgaatcaagatatttaatgatagccgcttattgtaacgatcgcgcccaattgctttccgcggggtttatgcttcccaatgatacggcttctgataaattaatagtaagttttcattattatgatccttatgaatttgggatccaaggcagcaggacttcctggggaactcccgccgacaagcaaaaaacagaaaatgattttgctccttttaaagtaaaattcatagataaaaatattccggtaattataggtgagtgcggcgcggtgctgcaattatattcggatgatccggcaaaagaacagcaggcgcgtcaaagccgcagggaatacctgccgcatattttcggcacggcgaaaaaatacgggatggttcctgtttattgggataacggctctgtgcgcgggaacggggagaaattcggccttatagaccggaataccggtcagccgaattcatctgagagtgacgcattgatcaagctgatgataagcgcggtaaagtaa

SEQ ID NO: 142 - protein, 377 aa, Unknown
  Obtained from environmental sample
MGGKSALDYLRSEKVYAGWNTGDTLDAWNGKIDQDGKLAFIESGEMVSWGNPLLNQELFNGLKTAGFSIVRIPITWMGYIGPAPDSHISESFLKRVAEITGYAKKAGLKVIINLHHDGATDSKKGDQGWLSVRQASRSQDDFNRITSQYVRVWKQIADYFKNYGDWLIFEGFNELHDGNWGSGGQIGQFITINKWNQFFVDTVRSTGGNNESRYLMIAAYCNDRAQLLSAGFMLPNDTASDKLIVSFHYYDPYEFGIQGSRTSWGTPADKQKTENDFAPFKVKFIDKNIPVIIGECGAVLQLYSDDPAKEQQARQSRREYLPHIFGTAKKYGMVPVYWDNGSVRGNGEKFGLIDRNTGQPNSSESDALIKLMISAVK

SEQ ID NO: 143 - DNA, 1308 bp, Unknown
  Obtained from environmental sample
atgtcaagaaaatttttactttttttatgtactttgtgtttcgctgtaactgtatggccggcggtctcctgcgcgagcgggaaggctgccgtcgttacttctgttacagcggataaagcttttgagtatactcccggcgttcccgatgccgtaaacaattatcctgaagaaccaatgggcggtaaatccgcccttggttatttaagggacgaaaaaatttccgccggcttgaatataggcaatacaatggacgcgtggaacggtgttattgaccaggacggcaaattggcgcttgttcaatccggggaatcggtcggttgggggaatccgaggttaaatcaggatttttttaacgggatgaaagccgccgggtttagcattgtccgtattcccataacatggatgggcagtataggccccgctcccgatttccatattaatgaagcgttcttaaaacgcgtcgccgaaataatcaattacgcgaaaaacgccggccttaaagtgattatcaacttgcaccatgacggcgcgacagattcaaagaaaggagatcagggctggctgtcggtcaggcaggcaagcagaaaccagaatgattttaaccgtgtaacaagccaatatgtccgcgtgtggaagcaaatcgcgaattatttcaggaattacggcgactggcttatatttgaatcttttaacgaacctcacgacggcaattggggctccggcggcgagacaggtcaatttattaccataacaaagtggaatcaattttttgttgatactgtgcgctcaacaggcggaaacaacgagtcaagatatttaatggttgccgcttactgcaacgatcgcggtaaattgctttccgccgggtttgtgcttcccaatgacaaggcttccgacaaattaattgtaagttttcattattatgatccttatgaattcgggattcagggcagcaggactttatggggaactcccgccgacaagcaaaaaacagaaaatgattttgcccccttaaaggaaaaattcatagataaaaatattccggtaataatgggggagtgcggcgcggtgctgcaattatacccggatgatccggcgaaagaacagcaggcgcgccaaagccgcagggaatacctgccttatattttcggcgcggcaaaaaaatacgggctggttccgatttattgggacaacggctctgtcagaggcaatggtgagaagtttggtcttcttgaccgcttaagcggcaagccgaattcaccggagagtgataccctgatcaaactgatgataagcgccgtaaagtaa

SEQ ID NO: 144 - protein, 435 aa, Unknown
  Obtained from environmental sample
MSRKFLLFLCTLCFAVTVWPAVSCASGKAAVVTSVTADKAFEYTPGVPDAVNNYPEEPMGGKSALGYLRDEKISAGLNIGNTMDAWNGVIDQDGKLALVQSGESVGWGNPRLNQDFFNGMKAAGFSIVRIPITWMGSIGPAPDFHINEAFLKRVAEIINYAKNAGLKVIINLHHDGATDSKKGDQGWLSVRQASRNQNDFNRVTSQYVRVWKQIANYFRNYGDWLIFESFNEPHDGNWGSGGETGQFITITKWNQFFVDTVRSTGGNNESRYLMVAAYCNDRGKLLSAGFVLPNDKASDKLIVSFHYYDPYEFGIQGSRTLWGTPADKQKTENDFAPLKEKFIDKNIPVIMGECGAVLQLYPDDPAKEQQARQSRREYLPYIFGAAKKYGLVPIYWDNGSVRGNGEKFGLLDRLSGKPNSPESDTLIKLMISAVK

SEQ ID NO: 145 - DNA, 1752 bp, Unknown
  Obtained from environmental sample
ttgcagagaacgccagttatccgccgaacccgtcggctacccgccgcgatcgttctgtctgcgttggcgacattcaccctaagcgctcacgcgaccactatggaaaacatcaggttaaaccagatcggctactatcctgagtcgcgcaaggtcgccacggtcgtcgtgagcgacgaaaagagcgtcccgtcggagtttcttgtcgtcggggtgcccggcggtaagacggtttttaggggcaagctctccgccgagcttttttggtgggaggagtccggggagcgcggcttccgcgccgacttttcggcggtcagcgcgccggggcagtacaagctcgtgatcttgggcgacgtgccgtacaagagcgagtcctatccgttcacgatctccggccaagcgttcaaggatgtggccgccgccactatgcgcgcctattactttcagcgctgctcctacgcgctcgccaagaagcacgcgggcaaatgggcccgcgccgccgggcatcccgatttggacgtcatctaccacccgtcgagcgggcattgggagggggagggaaaggttgcttcgccgggcggatggtacgacgccggggacttcggcaagtacatagtcaactccggcataacggtggggacgctcttggccttttacgagcgttttcctaattactttcccgacaagagtttggatatacccgagtcgggcagcggacgccccgatattctcgacgaggtgaagtttaacttggattggatgaagacgatgcaggacgttgacggcggcgtcttcttcaagctgaccacgctctcgttccccggatacatcatgccggatgaggacaaggggcagaggttcatcataggcaagagcacgacgtcgtcgctgaacttcgccgcggcgatggccgttgcggcccgggtgtacgcgcccttcgacagcgcctacgctaaaaactgcgccgagcgggcgctcttggcttgggactgggcggtgaagaacccgaacgccgtattcaaaaatccggcggacgtcaagaccggcgagtataaggacgcgaccttcgacgacgagttcatctgggcggcctcggagctcttcatcaccactaaagagaagcgtttcgccgattttcttaaaggcaaggagatctcttacgccggcgagccgtcgtggcagaacgtccattcattggcggcgctctcgctcgcgtccgtcaaaaacggcttagaaacacatcgtttggaaaccatccgtaaatcaataacgaaaacggcggacaagtggctgttggagatggacaagaacctatacagggtgccgaacattaagttcatttggggttcaaactcaagcttcgccaacattggcgtggggatgatctacgcccacatcgtatcgggagacgataagtatctcttgggcgcctctgagatagccgattatctgttggggaaaaacgcggtgggaatctcgtttgtcagcgccttcgggacaagggcgatgtcgaacccgcaccataggcaaagcgtggctggaaaagttggtcccataccgggcttcttggcgggcggcccgaacgccggtcagcaagacggtgcgaatggggtgacgtattcgtcaaaatcgccggcaaagagttacgaggacgtttacaagagctacgcctcaaacgaggtggcgataaattggaacgctccggcggtgtttttgtttggggctatagacgcgttaatgcaaaataagaaataa

SEQ ID NO: 146 - protein, 583 aa, Unknown
  Obtained from environmental sample
MQRTPVIRRTRRLPAAIVLSALATFTLSAHATTMENIRLNQIGYYPESRKVATVVVSDEKSVPSEFLVVGVPGGKTVFRGKLSAELFWWEESGERGFRADFSAVSAPGQYKLVILGDVPYKSESYPFTISGQAFKDVAAATMRAYYFQRCSYALAKKHAGKWARAAGHPDLDVIYHPSSGHWEGEGKVASPGGWYDAGDFGKYIVNSGITVGTLLAFYERFPNYFPDKSLDIPESGSGRPDILDEVKFNLDWMKTMQDVDGGVFFKLTTLSFPGYIMPDEDKGQRFIIGKSTTSSLNFAAAMAVAARVYAPFDSAYAKNCAERALLAWDWAVKNPNAVFKNPADVKTGEYKDATFDDEFIWAASELFITTKEKRFADFLKGKEISYAGEPSWQNVHSLAALSLASVKNGLETHRLETIRKSITKTADKWLLEMDKNLYRVPNIKFIWGSNSSFANIGVGMIYAHIVSGDDKYLLGASEIADYLLGKNAVGISFVSAFGTRAMSNPHHRQSVAGKVGPIPGFLAGGPNAGQQDGANGVTYSSKSPAKSYEDVYKSYASNEVAINWNAPAVFLFGAIDALMQNKK

SEQ ID NO: 147 - DNA, 1677 bp, Unknown
  Obtained from environmental sample
atgaaaaaagagaggaattttttatgggctgggtatagccgcagattgtacgcgatggcattaatctttgttatcggctttgccgccgcagcatgtaacaatgaccaggaaacagattccggcagcgaacctgacgttacagacggtcaaaaacctttcgttgatacagccgccgggaaaatagtcgccgatataaaaatcggctggaatctgggcaacacgcttgacgcgaccatgaacaccacatcgagtacatcggttaatcaaatggaaacagcgtggatcagacccgctacgacaaaagcgatgattaccacgataaaagaggccggttttaacgctataagaatccccgtatcctggacaaaggctgccggcgaagcgccggattatactatccgcgccgactggatgaagagggttaaggaaattgtcgattacgccgttgccaacgatatgtatattattttaaacacacaccatgacgaggaagtgtttacatttctgaattcaaacgcggaggcgggcaaggcggccttccaaaagatatgggagcagattgccgatgccttcaaggattacaacgagaaattgatttttgaaggattgaacgaaccaagaactcctggcagcaaggctgaatggagcggcggcactgccgaagaacgcgctaacctgaatgcctattacgccatttttgttgatactgtaagaaaatcgggcggtaataacgataagcgcgtattattaataaacgcatatgccgcttccgctgatgcggccgcgatgaacgcgttaacgctgcctgaagacagcgcggaaaacagacttattgtttctttccattcttatagcccttatgattttgccctgaataaagaccccacaaaaaattcgtggagcaagagcaattccggagatacctctgcaattaccggtccgattgaccgttattataataaattcgtcaaaaatgacatacccgtattaatcggcgaattcggcgccatgaataaagacaatgaagaagccagggcgcaatgggcggaatattatgtcagttacgccgccggcaaaggcattaaatgtttctggtgggataatggcgctactacaggcaatggtgaaaaattcggccttcttaacaggcagaataatacttttacatatcccgttttacttcagggcttgattagaggagcagggagcgccgctacgactacgccgactgtaccgactgagccaactacgccaactccaccagctattaaaggaaatatggacaaatacattattcaagcagatggcgaaggcaactatacacaggctgtttggacactgtcaggaactaacttaacaaccgcaaaaactgcgggggcaaaactggtactggaattatcagatgctccgaccaatgtaatgaagttggtatgggtaggaccggacaaaggactctggtggaatgaaaaagatattcttgataataaaggtagtgtcaaagtagaaacaaaagttacatgggattcaggtacaaaaacccttacaatccctctgtctgctaactctgttgcggattacaataactttaccgatcagccttcattgaaaattatcattgcttattacgggggcagcaatataaatgatctcggcatagtcagcgcaaaccttcaataa

SEQ ID NO: 148 - protein, 558 aa, Unknown
  Obtained from environmental sample
MKKERNFLWAGYSRRLYAMALIFVIGFAAAACNNDQETDSGSEPDVTDGQKPFVDTAAGKIVADIKIGWNLGNTLDATMNTTSSTSVNQMETAWIRPATTKAMITTIKEAGFNAIRIPVSWTKAAGEAPDYTIRADWMKRVKEIVDYAVANDMYIILNTHHDEEVFTFLNSNAEAGKAAFQKIWEQIADAFKDYNEKLIFEGLNEPRTPGSKAEWSGGTAEERANLNAYYAIFVDTVRKSGGNNDKRVLLINAYAASADAAAMNALTLPEDSAENRLIVSFHSYSPYDFALNKDPTKNSWSKSNSGDTSAITGPIDRYYNKFVKNDIPVLIGEFGAMNKDNEEARAQWAEYYVSYAAGKGIKCFWWDNGATTGNGEKFGLLNRQNNTFTYPVLLQGLIRGAGSAATTTPTVPTEPTTPTPPAIKGNMDKYIIQADGEGNYTQAVWTLSGTNLTTAKTAGAKLVLELSDAPTNVMKLVWVGPDKGLWWNEKDILDNKGSVKVETKVTWDSGTKTLTIPLSANSVADYNNFTDQPSLKIIIAYYGGSNINDLGIVSANLQ

SEQ ID NO: 149 - DNA, 1188 bp, Unknown
  Obtained from environmental sample
atgaaaaagattccagtatttttattggcatttctggtttttttcgccgttacaggatgttccggcgatattagtaacgataaaaaaacagaaaatgaagattattatacaagttccaatgctccggcgaaccaacaatcttataatgatataacagctttggaattagtgtccggaattaaaataggttggaatttgggcaatacacttgacgctaacgctgactggcttcctaaaaacgcttctgtttctgattttgaaaaagcatgggtacaaattgttactacacaggctaatattgataaaataaaaaatgccggttttaacgcaataaggattcccgtttcatggacaaaatgcgcggatagtaattatataatccgtaaagactggatggacagggttacggagattgtcaattacgcagtaaaaaatgatatgtacataattttaaatacgcaccatgacgaagatgtttttaaattttataatgctgataaagaagcggctataaaagcgtttaaaattatctggggacagattgccgttaattttaggaattataacgaaaaattgatatttgaagcgcttaacgaacctagaaccgccggcagcgcaaatgaatggaacggcggtactgctcaagagcgtaataaccttaatgagtattatcaggctttcgttgatgttgtaagagcaagcggcggcaataataacaaacgatttttgttgattaacccctatgcggcttccagtggtaatgcggcaatgaacgctcttgttattccaaaagacagtgcgtcaaaaaaaattattgtgtctttccattcatactcgccgtataattttgctttgaataaaaatggaactgacgattgggatgagtccaaaacatctgacaaaacggatattacaaattcaatggacgcgtttaaaacaaagtttgtaaataatggcattcctgtgataatcggtgaattcggcgcaatgcataaaaataatactgccaaaagagcggcatgggcaaaattttttgtaaaagaagcaaaggaaagaggtattccgtgtttctggtgggataacaacgcttttacaggtgacggtgaattattcggattattgaaaagaagcgacaattcattcccgtttcaggaaatagttagtgcgatgatggatggcataaaataa

SEQ ID NO: 150 - protein, 395 aa, Unknown
  Obtained from environmental sample
MKKIPVFLLAFLVFFAVTGCSGDISNDKKTENEDYYTSSNAPANQQSYNDITALELVSGIKIGWNLGNTLDANADWLPKNASVSDFEKAWVQIVTTQANIDKIKNAGFNAIRIPVSWTKCADSNYIIRKDWMDRVTEIVNYAVKNDMYIILNTHHDEDVFKFYNADKEAAIKAFKIIWGQIAVNFRNYNEKLIFEALNEPRTAGSANEWNGGTAQERNNLNEYYQAFVDVVRASGGNNNKRFLLINPYAASSGNAAMNALVIPKDSASKKIIVSFHSYSPYNFALNKNGTDDWDESKTSDKTDITNSMDAFKTKFVNNGIPVIIGEFGAMHKNNTAKRAAWAKFFVKEAKERGIPCFWWDNNAFTGDGELFGLLKRSDNSFPFQEIVSAMMDGIK

SEQ ID NO: 151 - DNA, 1755 bp, Unknown
  Obtained from environmental sample
ttgcagaggacgcccgttatccgccgaatccgtaggctgcccgccgccgcgatcgttttgtctgcgttggcaacgttcaccataagcgctcacgcgaccactatggaaaatatcaggttaaaccaaatcggctactacccgaactcgcgtaaagtcgcgaccgtagttatgggcgacgacaagagcgtgccgtcggagtttctggtcgtcggtctgcctggcggcaagacggtctttaggggcaagctatccgccgagctcttcttgtgggaggaggctggggagagcggtttccgcgccgacttttccgcgtttaacgttcccggacagtacaagctcgtgattttgggcaacgtgccctacaaaagcgagtcttacccgttcacaatatccgaccgcgccctcaaggacgtggccgccgcctctatgcgcgcctactacttccagcgctgctcctacgctctctccaagaagtacgcggacaagtgggcccgcgccgccggacatcccgatgcggatgttacctaccacccgtcaagcgggcattgggaaggggagggtaaggttacgactccgggcggctggtacgatgccggcgacttcggcaagtacgtcgtcaactccggcataacggtggggacgctcttggccttctacgagctatttcccaactacttcccagacaagagcttgaacataccggagtcgggcagcgggcgtcccgatattctcgacgaggcgaagtttaatttggattggatgaagactatgcaggatgttgacggcggcgtgttcttcaaggtgaccacgctctcgtttcccgggtacatcatgccggaagaggataagggtcagaggttcgtcataggcaagagcacgacgtcgtcgctgaacttcgccgcggctatggcgatggcggcaagggtgtacgcgcccttcgacagcgcctacgcgaaaaactgcgccgagcgggcgcgcttggcttgggattgggcggtgaagaaccctagcgccttgttcaaaaacccggcggacgtcaagaccggcgagtacaaggacgcgaccttcgacgacgagtttatctgggcggcggcggaactcttcatcaccacgaaagagaagcgcttcgccgattttctgaaggggaaggatataacatacgccggagaaccgtcttggcagaacgtccactcattggcggcgctctcgctcgcatccgtcaagaacggcttggatccgcagcgcgtggaagccatccgcaagtcgataacaaaaaccgccgacaagtggttatcggagatggacaaacacttatatagaataccgaacatgaagttcatctggggctcaaactcaagcttcgccaacatgggcgttggaatgatatacgcccacatcatatcaggcgacgataagtatctcttaggcgccgcggagatagccgattatctattagggaaaaacgcggttggaatatcatttgtcagtacattcgggacaaaagcaatgtcgaacccgcaccataggcaaagcgtggcgggaaaagtaggcccaatccccggttttttagctggcggtccaaacgccggtcaacaagacagcgcccacggggtaacctactcgtcaaaattaccggcaaagagttacgaggatgtttacaagagctacgcctcaaacgaggtggctataaattggaacgctccggcggtatttttattcggagcgatagacgcgttaatgcaaaaaaagccttaa

SEQ ID NO: 152 - protein, 584 aa, Unknown
  Obtained from environmental sample
MQRTPVIRRIRRLPAAAIVLSALATFTISAHATTMENIRLNQIGYYPNSRKVATVVMGDDKSVPSEFLVVGLPGGKTVFRGKLSAELFLWEEAGESGFRADFSAFNVPGQYKLVILGNVPYKSESYPFTISDRALKDVAAASMRAYYFQRCSYALSKKYADKWARAAGHPDADVTYHPSSGHWEGEGKVTTPGGWYDAGDFGKYVVNSGITVGTLLAFYELFPNYFPDKSLNIPESGSGRPDILDEAKFNLDWMKTMQDVDGGVFFKVTTLSFPGYIMPEEDKGQRFVIGKSTTSSLNFAAAMAMAARVYAPFDSAYAKNCAERARLAWDWAVKNPSALFKNPADVKTGEYKDATFDDEFIWAAAELFITTKEKRFADFLKGKDITYAGEPSWQNVHSLAALSLASVKNGLDPQRVEAIRKSITKTADKWLSEMDKHLYRIPNMKFIWGSNSSFANMGVGMIYAHIISGDDKYLLGAAEIADYLLGKNAVGISFVSTFGTKAMSNPHHRQSVAGKVGPIPGFLAGGPNAGQQDSAHGVTYSSKLPAKSYEDVYKSYASNEVAINWNAPAVFLFGAIDALMQKKP

SEQ ID NO: 153 - DNA, 1971 bp, Unknown
  Obtained from environmental sample
atgaccgcttttgaaaatgtaatcagcacagtgaaaagcacactcgcctcggcaacaactcaagcggaattggattcggcggtaaccgctctgcaatccgcaattacaacttttagcggcgcacggaaggaaggcacaaaaacctcaggctctgcttacactgttaccagtgtaacggtaagcccctttacagcaaatgtcgagaaaggcgtgacacagatctttaccgcgacagttacggtaacaaacggcgcggcgaaaactgttacctggtcaatcgaccagactaataaagacgcgggaactactatcactacaaatggtgtacttacagtggcagccgatgaaactcttacatcgattaccgtaagggcgacatcaacagtagatgctgctaagagtggaacggcaacagtaacagtaacctccggcggcggttcacaaactttcaaggacataacagccgcgcaattagtcgctgatataaaaatcggctggaatctgggcaactcacttgacgctactaccggttttggcgcaaatgccacggttaccgcaatggaaagaggatggggtaaccccgttacgacaaaagcgatgattaccgcgataaaaaacgccggctttaacgccatcagaattccagtgtcatggacaaaggctgccggcggagcgccgaattacaccattcgcgccgactggatggcgagggttaaggaaattgtcaattacgctgttgaaaacgatatgtatatcattttaaacacccaccatgacgaggacgtgcttacatttatgaattcaaacgcggcggcggggaaagcggcgttccaaaaactctgggagcagattgccgataccttcaaggattacaacgaaaaactgatctttgagggattgaacgaaccaagaacccccggcagttccagtgaatggaacggcggcactgccgaagaacgctccaacttgaattcctattaccccatttttgttaatacggtaagaaactcaggcggtaacaacgacaagcgcatattaatgataaacccctatgccgcttccatggaagcagccgcaatgaacgcgttagagctcccggcagacagcgcggcaaataaacttattgtttctttccactcttatcagccttataattttgccctgaataaagactccccaataaattcgtggaacagcagcagttccgcggatacttcgccaattaccgatccgattgaccgctattatactaaattcgtcagtcagggcattcccgtaataatcggcgaattcggcgctatgaataaaaacaatgaagctgtcagagcgcaatgggctgagtattatattagttacgcgcagagtaaaggcattaaatgtttttggtgggataatggcgttacaaccggcaacggtgaattgtttggcctgcttaacaggcagaacaatagttttacatatcccactttacttaacggtattatgagtggaacaggcggcgttgttccaacccctccaactccgccgactccgccaaccccgccaactaatattaccggaaatttgggcaactatcgttttggaactaatgaacagggcgctcctaactacacactggctgtatgggaactgtcatcagctaatgtaacgaccgcaaaaacagcaggggcaaaactgatgctggtattaacaacagccccaagcgctgtaatgcagtttgtatggcaagggccggccaatagtctctggtggaatcaaaaagatattcttgataataccggcaatgccatagccgcaacaacagttacatggaattcagacacaaaaacccttacaatccctttgtccgctaactctgttgaggattacagcacctttacagctcagccctcattgaacattatcattgcctattacggcggcgaaagtgttaatgatcttggcatagtcagcgcaaaccttcagcagtga

SEQ ID NO: 154 - protein, 656 aa, Unknown
  Obtained from environmental sample
MTAFENVISTVKSTLASATTQAELDSAVTALQSAITTFSGARKEGTKTSGSAYTVTSVTVSPFTANVEKGVTQIFTATVTVTNGAAKTVTWSIDQTNKDAGTTITTNGVLTVAADETLTSITVRATSTVDAAKSGTATVTVTSGGGSQTFKDITAAQLVADIKIGWNLGNSLDATTGFGANATVTAMERGWGNPVTTKAMITAIKNAGFNAIRIPVSWTKAAGGAPNYTIRADWMARVKEIVNYAVENDMYIILNTHHDEDVLTFMNSNAAAGKAAFQKLWEQIADTFKDYNEKLIFEGLNEPRTPGSSSEWNGGTAEERSNLNSYYPIFVNTVRNSGGNNDKRILMINPYAASMEAAAMNALELPADSAANKLIVSFHSYQPYNFALNKDSPINSWNSSSSADTSPITDPIDRYYTKFVSQGIPVIIGEFGAMNKNNEAVRAQWAEYYISYAQSKGIKCFWWDNGVTTGNGELFGLLNRQNNSFTYPTLLNGIMSGTGGVVPTPPTPPTPPTPPTNITGNLGNYRFGTNEQGAPNYTLAVWELSSANVTTAKTAGAKLMLVLTTAPSAVMQFVWQGPANSLWWNQKDILDNTGNAIAATTVTWNSDTKTLTIPLSANSVEDYSTFTAQPSLNIIIAYYGGESVNDLGIVSANLQQ

SEQ ID NO: 155 - DNA, 1782 bp, Unknown
  Obtained from environmental sample
atgtggcgatataaacaaggaggcacgttgcagagaacgcccgttatccgccgaacccgccggctgtccgccgccgcgatcgttctgtcagcgctggcaacgttcgctccgagcgctcgcgcgaccactatggaaaatatcaggctgaaccagatcggctactatccggagtcgcgcaaggtcgcgaccgtcgttgtgggcgacgacaagagcgcgccgtcggagtttcttgtcgtaggggtgccgggcgacaagacggttttcaggggcaaactctccgccgaactttttttgtgggaagagtccggggaacgcggcttccgcgccgacttctcggcggtcagcgctccggggcagtacaaactcgtgatcttgggtgatgtgccgtacaagagcgaatcctacccgttcgcgatttcagaccgggcgttcaaggatgtggcgaccgcctctatgcgtacctactactttcagcgctgctccttcgcgctctccaaaaagaacgccggcaagtgggcccgcgccgccgggcatcccgatttggacgtcacctaccacccgtcgagcgggcactgggagggcgagggaaaggttgcctcgccgggcgggtggtacgacgcgggggatttcggcaagtacgtcgtcaactccggcataaccgtggggacgctcttggccttctacgagcgcttccccaactacttccccgacaagagtttggacattccggagtccggcagcgggcggcccgatattctcgacgaggtgaagtttaatctggattggatgaagacgatgcaggacgtagacggcggagtcttcttcaaagtgaccacgctctcgttccccgggtacatcatgccggaggaggacaagggccagaggttcgtcataggaaagagcacgacgtcgtcgctgaacttcgccgccgctatggctgcggcggggcgggtgtacgcgccgatcgacagcgtctacgcgaaaaattgcgtcgagcgggcgctctcggcttgggattgggcggtgaagaaccccggcgcggtcttcaagaatccggcggacgtaaagaccggggagtacaaggacgcggcgttcgacgacgagtttatctgggcggcggcggaactcttcatcaccacgaaagagaaacgattcgccgatttcctgaagggcaaggagatcgcctacgccggcgaaccgtcttggcagaacgttcattcattggcggccctgtcgctcgccaccgtcaagaacggtttggatcaaagtagattagaggccatacgcaagtcgataacgaaaacagcggacaagtggctggcggagatggacaagcatctgtacagagtgccgaacatgaagttcatctggggctcgaactcgagtttcgccaacatgggcgtggggatgatctacgcgcatatcatatcgggagatgataagtatctcttaggcgcggttgaaatcgccgattatctgttggggaaaaacgccgtgggaatttcgtttgtcagcgcgttcgggactaaggcgatgtcgaacccgcaccataggcagagcgtcgcggggaaagtcggcgctattcccggcttcctagctggcggcccgaacgccgggcagcaggacggtacgaacggggtgacctattcgtctaaattaccggctaagagttacgaggatgtctacaagagttacgcttcgaacgaagtggcgataaactggaacgctccggcggtgtttttgttcggggcgatagacgcgttgatgcagggcaggaagtga

SEQ ID NO: 156 - protein, 593 aa, Unknown
  Obtained from environmental sample
  SIGNAL (1)...(41)
MWRYKQGGTLQRTPVIRRTRRLSAAAIVLSALATFAPSARATTMENIRLNQIGYYPESRKVATVVVGDDKSAPSEFLVVGVPGDKTVFRGKLSAELFLWEESGERGFRADFSAVSAPGQYKLVILGDVPYKSESYPFAISDRAFKDVATASMRTYYFQRCSFALSKKNAGKWARAAGHPDLDVTYHPSSGHWEGEGKVASPGGWYDAGDFGKYVVNSGITVGTLLAFYERFPNYFPDKSLDIPESGSGRPDILDEVKFNLDWMKTMQDVDGGVFFKVTTLSFPGYIMPEEDKGQRFVIGKSTTSSLNFAAAMAAAGRVYAPIDSVYAKNCVERALSAWDWAVKNPGAVFKNPADVKTGEYKDAAFDDEFIWAAAELFITTKEKRFADFLKGKEIAYAGEPSWQNVHSLAALSLATVKNGLDQSRLEAIRKSITKTADKWLAEMDKHLYRVPNMKFIWGSNSSFANMGVGMIYAHIISGDDKYLLGAVEIADYLLGKNAVGISFVSAFGTKAMSNPHHRQSVAGKVGAIPGFLAGGPNAGQQDGTNGVTYSSKLPAKSYEDVYKSYASNEVAINWNAPAVFLFGAIDALMQGRK

SEQ ID NO: 157 - DNA, 1971 bp, Unknown; identical to SEQ ID NO: 153
  Obtained from environmental sample

SEQ ID NO: 158 - protein, 656 aa, Unknown; identical to SEQ ID NO: 154
  Obtained from environmental sample

SEQ ID NO: 159 - DNA, 1266 bp, Unknown
  Obtained from environmental sample
gtgatttttaaaaagacgctgtttttcacatttactttttatgctctcctgctgaccgcttgccgttcttccaacggtggagcggctgaatcaacttataattatgttccttcacagccggacaggatacgggaacatccgctggaacctgtcagcgggaaaacggcgattaattattttaaagatgaaaaaatattttccggctggaatatgggaaacactttagactcatattccggcggagtgggaagcgaaacagtctggggtaatcctcccattaatcaggaaataatgaacggcgtaaaaaaagccgggttcgatattatccgtattccggtaacatggatgggtaatttcggtatgccgcccgattaccgtatcagttccgcccgtcttgaacgcgtagcggaagccgtggaaatggcgcataacgccggattaaaggtaattatcaatattcatcatgacggttctactccgcaagagggcaaagacgacggctggctctcaatcgcaaaggcggcaaaaaataaggatgaatacgaaaaaataacgcatcaatttgcgcgcgtttgggatcagattgccgcgtattttaaaaattacggcgactggctgatgtttgaatctatgaatgagattcacgacggcggctggggctggagttataactttcagactttcccgaaatttcaaactgatattgtcaataaatggaatcagatttttacggacagggtgcgcgcggcagggggtaacaataccgatcgttatctgattatgcccgcctattgcactcagccgcagcaaacgctgtccggtaattttgtactgccaaaagaccctacgcccggcaaacagattgtcactttccattattatgatccctatgaattcagcatagcaagtaaacgtcccgcgtggggaacggacggcgataaacataaaatagacgtcgattttgcgccttttaaaaaggtttttatagataatgatattccggtgataataggagaaacaggcgcggcattgcagacgtatccaaacgacaaaggagttgaggcgcaggcgcgccagagcagaataagctacattaccagtgtgtttgttactgccaaaaaatacggacttgttccgatttactgggacaatggctctataagcggtaatggggaaaaattcggtctttttgaccggaggacggggcagccgaattcggcggacagttccacccttatcaacattatgattaatagtgtaaaatag

SEQ ID NO: 160 - protein, 421 aa, Unknown
  Obtained from environmental sample
MIFKKTLFFTFTFYALLLTACRSSNGGAAESTYNYVPSQPDRIREHPLEPVSGKTAINYFKDEKIFSGWNMGNTLDSYSGGVGSETVWGNPPINQEIMNGVKKAGFDIIRIPVTWMGNFGMPPDYRISSARLERVAEAVEMAHNAGLKVIINIHHDGSTPQEGKDDGWLSIAKAAKNKDEYEKITHQFARVWDQIAAYFKNYGDWLMFESMNEIHDGGWGWSYNFQTFPKFQTDIVNKWNQIFTDRVRAAGGNNTDRYLIMPAYCTQPQQTLSGNFVLPKDPTPGKQIVTFHYYDPYEFSIASKRPAWGTDGDKHKIDVDFAPFKKVFIDNDIPVIIGETGAALQTYPNDKGVEAQARQSRISYITSVFVTAKKYGLVPIYWDNGSISGNGEKFGLFDRRTGQPNSADSSTLINIMINSVK

SEQ ID NO: 161 - DNA, 1542 bp, Unknown
  Obtained from environmental sample
atgaaaaagatgttatttgcggttacgctgttcaccgtcttatccgcagtcagcgtttacgcggtaaagaccacacgctattgggatggttgtaagccgagttgcggttggagcgccaacgccaacggcaacccttgcgcgtcttgcgacgttaagggcaataaagacaacggcaacaatcaaagcgcgtgcggcggcggaaattcatacacctgcatggcccaagttccttgggcggtgagcgacaatttgtcctacggctttgcggcttctcacacaaacggcaattgcggcaagtgctttgagttgaattttaccagcggcatttccgggaaaaaaatggtggtcatgataagcaacatcggtggcgacgtggcgggagatcaatttgacctcatgattcccggcggcggggtgggtcaattcaacgccttaagcacgcaaattcagcagaacggcggtagcagttcaaatttgggtcagcaatacggcggctttagggccacgtgcggcgccaacgagagttgcattcgaaaaatgtgcgacgacgccttcggctccgcggcgctcgccgatatgaagcgcggttgctattggtacatagattggttcaaaatggccgacaatcccaatgccgattccaggcaggtagactgcccggcggagttggtgacttcgtataaaaacggcacacccggcagcagcggcaacgtcaaccccacgccaacgacttacacgctcacgctcacaagaaacccgaccgagggcggatccaccactccggcaagcaatcaatccaacatcaccgccggaacgcaggtcaatatatcggccaacgcgagttccggctatacgttcaacaattggacggtatccggcagcggcacggttgccgacacaaaaagcgcttcaacaaaggtaacggtaaacggaaacgtgaccgtaacggccaacttcaccaaaaacaccacacagtatacgctgacggtcaaccgcagcccgacggcgggcgggtcggtgaaggtcaacaacgcggattactcatcgcctgtccaggtgaacagcgggacggcggtcaacatatcggctaccgcggcgagcgggtacacgtttacgaattggacggtgaccaccggcacggcgcagataaacaacgcgaacagcgccagcacgacggtctcgctcagcgcgaacgccacgattaccgccaacttcacgcagaatccgacaacgcctacgacatacacgctgaccgtcaaccgccagccgagcaccagcgccggcacggtgaaggtcaacaacgcggattactcggcgcctgtttccgtaaacagcgggacggcggtcaacatagcggccacgccggcgaccggatacaagttcgccagttggactgtatcgacgggcaccgcatccatcgccagcgcgagcaacgcgacgacgaccgtcactttaacgtcaaacgccacggtcaccgccaactttacgccgacgtcaagcggcggcggcggcagcggcaaggacacgataaaggtctcgtgc

SEQ ID NO: 162 - protein, 514 aa, Unknown
  Obtained from environmental sample
MKKMLFAVTLFTVLSAVSVYAVKTTRYWDGCKPSCGWSANANGNPCASCDVKGNKDNGNNQSACGGGNSYTCMAQVPWAVSDNLSYGFAASHTNGNCGKCFELNFTSGISGKKMVVMISNIGGDVAGDQFDLMIPGGGVGQFNALSTQIQQNGGSSSNLGQQYGGFRATCGANESCIRKMCDDAFGSAALADMKRGCYWYIDWFKMADNPNADSRQVDCPAELVTSYKNGTPGSSGNVNPTPTTYTLTLTRNPTEGGSTTPASNQSNITAGTQVNISANASSGYTFNNWTVSGSGTVADTKSASTKVTVNGNVTVTANFTKNTTQYTLTVNRSPTAGGSVKVNNADYSSPVQVNSGTAVNISATAASGYTFTNWTVTTGTAQINNANSASTTVSLSANATITANFTQNPTTPTTYTLTVNRQPSTSAGTVKVNNADYSAPVSVNSGTAVNIAATPATGYKFASWTVSTGTASIASASNATTTVTLTSNATVTANFTPTSSGGGGSGKDTIKVSC

SEQ ID NO: 163 - DNA, 1473 bp, Unknown
  Obtained from environmental sample
atgagtcgcaccagaaccgcgctcctcgccgccatggcgctggtcgccggcgccaccgggtcggcgatcgccgccgtcccgggcgacgccggcgcggccgccgtcccctgcaccgtggactacaccgtgcagaaccagtgggacaccggcttcaccgcgtccgtgacggtcaccaaccacggcgccgcgaagtcgtcgtgggcggtgaactggacctacgccggcaaccagagggtgaccagcggctggaacgcccggatcacccagtccggcgcgaacgtcacggcggccaacgagtcgtacaacgccacgctcgccagcggaggctccgcaaccttcggcttccagggcagctacagcgggaccaacgccgtgcccagcaccttcaccctcgacggcgtgacctgcaacgtcgacgacggcggcaccgacccgacggacccgaccgacccgaccgacccgcccgcccagggcgaccgggtggacaacccgtacgacggcgccaaggtgtacgtgaacccggagtggtcctcgaacgccgccgccgagccgggcggcgacgccgtcgccgaccagccgaccggtgtgtggctggaccgcatcgccgccatcgacggcgccaacggcaagatgggcctgcgcgaccacctcgacgaggcgctgcgccagaagggctccgacgagctcgtcttccaggtggtcatctacgacctcccgggccgcgactgcgccgccctcgcctccaacggcgagctgggcccgacggagatcgaccgctacaagaccgagttcatcgacccgatcgcggagatcctctccgactcgaagtacgcctcgctgcggatcgtcaccacggtcgagatcgactcgctgcccaacctggtcaccaacgtgtcgccgcgggccaccgccacggcgaactgcgacacgatgaaggccaacggcaactacatcaagggtgtcgggtacgccctgaacaagctgggcgacgtgcccaacgtctacaactacatcgacgcgggccaccacggctggctgggctgggacgacaacttcggcccctccgccgagctgttcaagcaggccgcgaccgccgagggcgcgaccgtggccgacgtgcacggcttcatcgccaacacggccaactacagcgcgctggaggaggaccacttctccgtcaacgacagcgtgggcggcaagtccgtgcgcgagtcgaagtgggtcagctggaaccgctacgtcgacgagctgtcgtacgcccaggccctgcgccagaagctggtctcgctcggcttcgactcgaagatcggcatgctgatcgacacgtcccgcaacggctggggcggtgcgaaccggcccaccggtcccggcgccaccaccgacgtggacacctacgtcgacggcggccgctacgaccgccggtacaacacgggcaactggtgcaaccaggccggagccggtctgggtgagcgg

SEQ ID NO: 164 - protein, 491 aa, Unknown
  Obtained from environmental sample
MSRTRTALLAAMALVAGATGSAIAAVPGDAGAAAVPCTVDYTVQNQWDTGFTASVTVTNHGAAKSSWAVNWTYAGNQRVTSGWNARITQSGANVTAANESYNATLASGGSATFGFQGSYSGTNAVPSTFTLDGVTCNVDDGGTDPTDPTDPTDPPAQGDRVDNPYDGAKVYVNPEWSSNAAAEPGGDAVADQPTGVWLDRIAAIDGANGKMGLRDHLDEALRQKGSDELVFQVVIYDLPGRDCAALASNGELGPTEIDRYKTEFIDPIAEILSDSKYASLRIVTTVEIDSLPNLVTNVSPRATATANCDTMKANGNYIKGVGYALNKLGDVPNVYNYIDAGHHGWLGWDDNFGPSAELFKQAATAEGATVADVHGFIANTANYSALEEDHFSVNDSVGGKSVRESKWVSWNRYVDELSYAQALRQKLVSLGFDSKIGMLIDTSRNGWGGANRPTGPGATTDVDTYVDGGRYDRRYNTGNWCNQAGAGLGER

SEQ ID NO: 165 - DNA, 1722 bp, Unknown
  Obtained from environmental sample
atgagccgcaccagaacatcgatactcgccgccatggccctggtggccggcgccacggggacggcgctgaccgccgcacccgccagcgccgccgtcccctgtaccgtcgactacaaggtcaaccagtgggacagcggcttcaccgccgatgtcaccgtcaagaacaacggcgccgccaagtcgagttggtcgctgaagtggacctacgccggcaaccagaaggtcaccagcggctggaacgcgaagatcagccagagcggtgccaacgtcgccgcggccaacgagagctacaacggcagcctccccacgggcggttccgtcaacttcggcttccagggcacctacagcggcaccaacgcgatcccggccgccttcaccctcgacggtgtcacctgcaacgtcgacagcggtggcggcgaccccggtggcggcggtgaccccggtggcggcggcaaccccggcggcggcggaagccgcgtcgacaacccgtacaccggtgccaaggtgtacgtgaacccggagtggtccgcgaaggccgccgcggagccgggcggcacccgcgtctccaaccagcccaccggcgtctggctcgaccgcatcgccgcgatcaacggcgtgaacggcggcatgggcctgcgcgcccacctggacgaggccctgaagcagaagggcagcggcgaagaggtcatccaggtcgtcgtctacgacctgccgggacgcgactgcgcggccctcgcctccaacggcgagctcggcccgacggagatcgacaagtacaagacccagttcatcgacccgatcgcggccatcctcggcgacgccaagtactcctcgctgcggatcgtcaccaccatcgagatcgactcgctgccgaacctggtcaccaacaccggcagccgcgccaccgccacaccgcagtgcgacaccatgaaggccaacggcaactacgtcaagggtgtcggctacgcgctcgccaagctcggcaagatcccgaacgtctacaactacatcgacgccgggcaccacggctggatcggctgggacgacaacttcggcccgtcggccgacatcttcaagcaggcggccaccagtgagggcgcgtccgtcaacgacgtgaccggcttcatcaccaacaccgccaactacagcgcgctgaaggagaacaacttcacgatcaacgaccaggtgaacggcgtctcggtacgccagtccaagtgggtggactggaaccagtacgtcgacgagctgtccttcgcgcaggccttccgtcagaagctcgtctcggtcggcttcaactccaacatcggcatgctgatcgacacctcgaggaacggctggggcggatcggcccgtccggccggcccgggtgccaagaccagcgtggacacctatgtcgacggcgggcgctacgaccgccgcgtgcacatgggcaactggtgcaaccaggcgggcgccggtctcggcgagcgtccgaaggcggcgccggccgccggcatcgacgcctatgtgtggatgaagcccccgggggagtccgacggttccagctcggccatcccgaacgacgagggcaagggcttcgaccgcatgtgcgacccgacctacggcggcaacgcccgcaacggcaacagcatgtcgggcgcgcttgcgaacgctccggtctccgggcactggttctccgcgcagttccaggaactcatgaagaacgcgtacccggcgctgtga

SEQ ID NO: 166 - protein, 573 aa, Unknown
  Obtained from environmental sample
MSRTRTSILAAMALVAGATGTALTAAPASAAVPCTVDYKVNQWDSGFTADVTVKNNGAAKSSWSLKWTYAGNQKVTSGWNAKISQSGANVAAANESYNGSLPTGGSVNFGFQGTYSGTNAIPAAFTLDGVTCNVDSGGGDPGGGGDPGGGGNPGGGGSRVDNPYTGAKVYVNPEWSAKAAAEPGGTRVSNQPTGVWLDRIAAINGVNGGMGLRAHLDEALKQKGSGEEVIQVVVYDLPGRDCAALASNGELGPTEIDKYKTQFIDPIAAILGDAKYSSLRIVTTIEIDSLPNLVTNTGSRATATPQCDTMKANGNYVKGVGYALAKLGKIPNVYNYIDAGHHGWIGWDDNFGPSADIFKQAATSEGASVNDVTGFITNTANYSALKENNFTINDQVNGVSVRQSKWVDWNQYVDELSFAQAFRQKLVSVGFNSNIGMLIDTSRNGWGGSARPAGPGAKTSVDTYVDGGRYDRRVHMGNWCNQAGAGLGERPKAAPAAGIDAYVWMKPPGESDGSSSAIPNDEGKGFDRMCDPTYGGNARNGNSMSGALANAPVSGHWFSAQFQELMKNAYPAL

SEQ ID NO: 167 - DNA, 2199 bp, Unknown
  Obtained from environmental sample
atgaccgcttttgaaaacgcaatcagcgcggcgaaaagcgcgctcgcctcggcagcgactcaaggagcgttggattcggcggtaaccgccctgcaatccgcaattacaacttttagcggcgcgcggcaggatggcgcaaaaacttcaggctttacttccgcgcaggtaaccgcgttgataaacagcgcgaaagctgacaaagaaggggtacgcaccagcgctaacggcgatgatgtcagcccggtagaatattgggtaaattcgtccgttcttggtgcatttaacgcggcaatcaccgcgctggaaaacgcaagcggccaatcggctattgacgccgcctacctcgctcttatccaggccggaaaaacatttaacgatgccaaacgacacggaacaactccggacagaaccgcgttaaacaacgccattaccgccgccgttaacgccaagaacggcgtacagacagcggcagacaaagatcaggcttctctcggttcatcatgggcgactggcgcgcagtttaacgcgcttaacacggctattgacagcgcgactgccgtaaaaaacaatgccaacgcgacaaaggcgtcggtggataccgcggcggcttccctgaatgccgcgattgccacctttactacggcggtaaccaacaacggtcccggcacacaaactttcagggacataacggccgcgcaattagtcgctgaaataaaaatcggctggaatttgggcaactcacttgacgctcacaacgggtttcccgcaaaccccacggttgaccaaatggaaagaggatggggtaaccccgctacgacaaaggcaaatattaccgcgttaaaaaacgccggctttaacgcaatcaggattcccgtgtcctggacaaaggccgcgagcggagcgccgaattacaccattcgtactgactggatgacaagagttaaggaaattgtcaattacgccgttgacaacgatatgtatatcattttgaacacacaccatgacgaagacgtgctcacatttatgaattcaaacgcggcggcgggaaaagcggcgttccagaaactctgggaacagattgccgctgccttcaaggattacaacgaaaaactgatttttgagggattgaacgaaccaagaacccccggcagttccaatgaatggaacggcggcactgacgaagaacgcaataacctgaattcctattaccccatttttgttaatacggtaagaagctcaggcggtaataacggcaagcgcatattgatgataaacccctatgccgcttccatggaagcagtcgcgatgaacgcgttaacgcttccggcagacagcgcggcaaataaacttattgtttctttccactcttatcagccttataattttgccctgaataaagactcctcaataaatacgtggagcagcagcagttccggggatacttcgccgattaccggccctattgatcgctactataacaaattcgtcagtcagggcattcccgtaataatcggcgaattcggcgccatgaataaaaacaatgaggctgtcagggcgcaatgggccgaatattatgtcagttacgcgcagagtaaaggtattaaatgtttttggtgggataatggcgttacaagcggcagcggtgaattatttggcctgcttaacagaactaacaatacttttacatataacgctttacttaacggtatgatgagtgggacaggcggaactgttccaacccctccaaccccgccggctacgccaaccccgccaaccactattaccggaaatttgggcacctaccaatttggaacacaggaagacggagtttcacctaactatacacaagctgtttgggaactgtcgggaacaaacttaacaaccgcaaaaacaaccggagcaaaactggtgctggtcttcacaacagctccaaacgcttcaatgcactttgtatggcaggggccggctaatagcctctggtggaatgaaaaagaaattcttggcaataccggtaatccaagcgcaacgggtgttacatggaattcaggcacaaaaactcttacaattcctctgaccgctaactcagttaaagattacagcgtctttaccgctcagccatcattgaggatcatcattgcctattacaatggcggaaatgttaatgatcttggcatagtcagcgcaaacctgacacaatga

SEQ ID NO: 168 - protein, 732 aa, Unknown
  Obtained from environmental sample
MTAFENAISAAKSALASAATQGALDSAVTALQSAITTFSGARQDGAKTSGFTSAQVTALINSAKADKEGVRTSANGDDVSPVEYWVNSSVLGAFNAAITALENASGQSAIDAAYLALIQAGKTFNDAKRHGTTPDRTALNNAITAAVNAKNGVQTAADKDQASLGSSWATGAQFNALNTAIDSATAVKNNANATKASVDTAAASLNAAIATFTTAVTNNGPGTQTFRDITAAQLVAEIKIGWNLGNSLDAHNGFPANPTVDQMERGWGNPATTKANITALKNAGFNAIRIPVSWTKAASGAPNYTIRTDWMTRVKEIVNYAVDNDMYIILNTHHDEDVLTFMNSNAAAGKAAFQKLWEQIAAAFKDYNEKLIFEGLNEPRTPGSSNEWNGGTDEERNNLNSYYPIFVNTVRSSGGNNGKRILMINPYAASMEAVAMNALTLPADSAANKLIVSFHSYQPYNFALNKDSSINTWSSSSSGDTSPITGPIDRYYNKFVSQGIPVIIGEFGAMNKNNEAVRAQWAEYYVSYAQSKGIKCFWWDNGVTSGSGELFGLLNRTNNTFTYNALLNGMMSGTGGTVPTPPTPPATPTPPTTITGNLGTYQFGTQEDGVSPNYTQAVWELSGTNLTTAKTTGAKLVLVFTTAPNASMHFVWQGPANSLWWNEKEILGNTGNPSATGVTWNSGTKTLTIPLTANSVKDYSVFTAQPSLRIIIAYYNGGNVNDLGIVSANLTQ

SEQ ID NO: 169 - DNA, 3066 bp, Unknown
  Obtained from environmental sample
atgttacacaaaaagttattggaatgtggtaattatcatcaccggcctataagaaaaggcaggagattcttaaagactgccgtagccacggcagctgctttgggaatgcttgcagcttcttttatgcctggtaattattccggtacctcgcaggcagcggagaccggtacggacacctatcaggacagatttttagaactttggggagatcttaatgatcctgccaatggttatttcagtccacaggggataccctaccattctgctgaaactctaattgtggaagcaccggattacggtcacgtaacgaccagtgaagcaatgagctattatatgtggcttggagccatgtacggcaaatttaccggagatttttcaggctttgaaaaagcctgggatgtagcagaaaaatatctcattccgacagaagcggaccagccaaatgtcagtatgagcagatatgacgccagcaaaccggcaacctatgctcctgaatgggaattacctagtctctatccggcacagttaaatttcagtgccccggttggaagggaccctattaacagtgaacttgtctctgcttatgggacaaacaccatgtacggcatgcactggctcctggatgtggataactggtatggttacggcaggcggggagacggtgtaacagcaccatcttatatcaacacgttccagagaggcaaagaagagtctacctgggaaacggttccacagcccagctgggatgcgatgaaattcggcggcagaaacggttatctggacttattcaccggagacagtagttacgccacccagtttcgatacacggatgcacctgatgcggatgcccgggccatacaggcaacctactgggcagatcagtgggcggatgaagcaggtgtggatatcggcgcttacaagggtaaagccagtaagatgggagattatttaagatacgcaatgtttgataagtatttcagaaagatcggtgactcgactgtggcaggtaccggctatgattccgcacactacctgttgtcctggtattatgcctggggcggcggaatcagctccaactgggcctggaaaataggcagcagccataaccatttcggttaccagaatcccatgacggcctggattctgtcggaagataatgaatttaagccagcctctgcccatggtgcctctgactggggcgtaagccttgacagacagctggaattctaccagtggctgcagtctgcagaaggtgccattgcgggaggcgccagcaattcacgcaacggccgttatgaaacctggccggcaggaacttctaccttctatggtatgggttacgaagcaaatccggtatatgccgatcccggcagcaatacctggtttggtttccaggcatggtccatgcagcgtatagcagaattatattataagaccggcgatcttagagccaaagcacttttggataaatgggtgggctggattaagacagtggttcaattaaacagtgacggtacctttgcaataccaagtaacatcgactggagcggtcagccggatacctggaacggaacctataccggtaatcctaaccttcatgtaatcgtaaacagctatggtacagaccttggtgtagcaggttccttagccaatgcattgttgtattacagtaaggcttccggtgacgatgaagccagagtgattgccaaggaactcttagaccgtatgtggactttgtaccgggacgacaaaggacttgcagcgccggaaacaagagcggattaccaccgtttctttgaccaggagatctttatccctgccggctggagcggaaaaatgcccaacggtgatgtaattaaacccggtgtaaaattcctggacatccgttccaaatataaaaacgatccggactatcagaaagtactggatgcatacaataacggaacagatccggagttctattaccatcgcttctgggcacagtgtgatattgccattgccaatggtgtttattcccttctttttggagaaggctcagagccggttgaaaactctgagattactcctttaacagctgattttgataagaatgtcttgcaccaggcggacatagacgttaccatgaacttaaacggcaacacctttaacggaataaaagacggagcagcttatctggtgcagggcacggattacacccttacaggtgatgtggtaacccttaccagtgcttatctggccggaaaagaaaccggtgatttaaaactcacctttgatttcagcaaaggagtggatccggttctgactgtaaccattagtgatacgacattaggcggttccattacacccacagctgcaacatttgataaaaaccctgccagacaggctgatgtaacagtaacccttaccactgcgggtcataccttagatgccattaagatcggcagtacggtcttggcaggcggtacggattatacggtaagcgcaagcacagttaccctgcataaagcagctttggctgccttgcagaccggtgtatacagtgttgtatttgacctcagtgcaggaaaagatcctgttctgaccctgacagtaacggatacctctgttgcagcgggaaaaatcaaggtgcagatgtataacggaaacacagctgcccagacaaatggtatttcacccagaattaagctttataattccgggaccaccaatgtgaaactatcggatataacccttagatattactatactattgacggcgataaacctcagaacttctggtgcgactggtccagtgccggcagcggcaatgtaacaggcacctttgtaacaatgccgtcaacaaaaccgggagcagatcattacctggagatcggctttactactgctgccggagaactacaggcaggagcttccattgaagttcaggcaagattttcaaagagtgactggacgaattatacccagacgggagattattcctttaatggaaccggcaccaattatgcagactggtcaaaagttaccggttatatttcgggtaccttaaattggggagtagagccataa

SEQ ID NO: 170 - protein, 1021 aa, Unknown
  Obtained from environmental sample
  SIGNAL (1)...(52)
MLHKKLLECGNYHHRPIRKGRRFLKTAVATAAALGMLAASFMPGNYSGTSQAAETGTDTYQDRFLELWGDLNDPANGYFSPQGIPYHSAETLIVEAPDYGHVTTSEAMSYYMWLGAMYGKFTGDFSGFEKAWDVAEKYLIPTEADQPNVSMSRYDASKPATYAPEWELPSLYPAQLNFSAPVGRDPINSELVSAYGTNTMYGMHWLLDVDNWYGYGRRGDGVTAPSYINTFQRGKEESTWETVPQPSWDAMKFGGRNGYLDLFTGDSSYATQFRYTDAPDADARAIQATYWADQWADEAGVDIGAYKGKASKMGDYLRYAMFDKYFRKIGDSTVAGTGYDSAHYLLSWYYAWGGGISSNWAWKIGSSHNHFGYQNPMTAWILSEDNEFKPASAHGASDWGVSLDRQLEFYQWLQSAEGAIAGGASNSRNGRYETWPAGTSTFYGMGYEANPVYADPGSNTWFGFQAWSMQRIAELYYKTGDLRAKALLDKWVGWIKTVVQLNSDGTFAIPSNIDWSGQPDTWNGTYTGNPNLHVIVNSYGTDLGVAGSLANALLYYSKASGDDEARVIAKELLDRMWTLYRDDKGLAAPETRADYHRFFDQEIFIPAGWSGKMPNGDVIKPGVKFLDIRSKYKNDPDYQKVLDAYNNGTDPEFYYHRFWAQCDIAIANGVYSLLFGEGSEPVENSEITPLTADFDKNVLHQADIDVTMNLNGNTFNGIKDGAAYLVQGTDYTLTGDVVTLTSAYLAGKETGDLKLTFDFSKGVDPVLTVTISDTTLGGSITPTAATFDKNPARQADVTVTLTTAGHTLDAIKIGSTVLAGGTDYTVSASTVTLHKAALAALQTGVYSVVFDLSAGKDPVLTLTVTDTSVAAGKIKVQMYNGNTAAQTNGISPRIKLYNSGTTNVKLSDITLRYYYTIDGDKPQNFWCDWSSAGSGNVTGTFVTMPSTKPGADHYLEIGFTTAAGELQAGASIEVQARFSKSDWTNYTQTGDYSFNGTGTNYADWSKVTGYISGTLNWGVEP

SEQ ID NO: 171 - DNA, 2157 bp, Unknown
  Obtained from environmental sample
atgagaaaaggtattaaaaaacttggttctgttgctatagcagctgctatgacagtatccttgatatctacaagcgtgtatgctgcggcacccgctgtaaatgcagaatataagagccgttttgatactatgtatcaaaaaataaaggatccttcaaacggctatttcagtactgaaggtatcccttatcactcaatcgaaactcttttggttgaagcaccagactacggacatgttactaccagtgaagccttcagctactatatgtggctggaagcaatgaagggtagattttcaggtgactttacaggcttcggaaagtcatgggatatagctgaaaagtatataattccatcatctcaggatcagcccaattcaagtatgagcaaatacgaccctaacaagccggcaacatatgctcccgaatatgagactcctaaccagtacccggcaaaactggataccggagctgcagtaggtaaagacccaatcagcaaggaattggtttcggcatatggcaccaacatgatatatggtatgcattggattctcgacgttgataactggtatggctacggtttgagagctgatggaaaatccagaccgtcatatataaataccttccaaagaggcgaacaggagtcaacctgggaaacaatacctcagccatgctgggatggaatgaacttcggcggtaaaaacggttatcttgacctctttaccggagacaattcatactcaaaacagttcaaatataccgatgcacctgatgctgatgcccgtgcggtacaggcaacctactgggcagaccagtgggcaaagatgcagggtaaggatgtaagcacatatgttggtaaagcaacgaaaatgggtgattatctgagatattcaatgtttgacaaatatttcagaaaaattggttcaccacaaacagcaggcacaggttatgatgcagctcactacctgctctcatggtactatgcatggggcggcggaattggttcagactgggcttgggtaatcggcagcagtcataaccacttcggatatcagaatcctatggcagcatggatactgtcatcagatgcaaccttcaagccaaagtcaaccaatggcgcaagcgattggggcaagagcttgtcaagacagattgaattctaccagtggctgcagtcagcagaaggtgctatagccggaggtgccagcaactcaaacaagggccgttatgaggcttggccttcatcaactgcaaccttctatggcatgggctatacagcaaacccagtatatgcagacccaggcagtaacacctggtttggtatgcaggtatggtcaatgcagcgtatggctgaatactattaccagacaaaagattcaaaagttaagagtcttttggacaagtgggcaaaatgggcaaattcaacaatccagttcaatgcagacggaaccttccagattcctagcaccattgactggagcggacaacctgatacctggaacggaacctatactggaaatccgaacctccatgtaacagttgtaaattccggtgcagaccttggtgttgcttcctcactggcaaatactcttgcctactatgctgcagcatccggtgatgccacttcaaagacaaatgccaagaagcttctcgacggcatgtggaacaattaccaggacagcaagggaatatcagttcctgaaacacgtaacgattaccaccgtttccttgatcaggaagtgtatataccttccggctggacaggaacaatgcctaatggtgataagatccaatcaggcatcaagttcatagacatccgttccaagtacaagcaggatcctgactgggccagagttgaagctgacctgaaggcaggaaagagtcctacgatggtttaccaccgtttctgggctcagagtgaatttgcaatagctaatggtgtttacgctatactgttcccagagccagatccagttgaacttctgggagacgtaaatgctgacaatgctgtggatgctattgacctggcagtattgaagaagttcctcttggacagcacaactacaattaattcaaagaatgcagatatgaatgcagacggagttgtagatgcgattgaccttgcaaaattaaagatcaagctgttatcaggaatctaa

SEQ ID NO: 172 - protein, 718 aa, Unknown
  Obtained from environmental sample
MRKGIKKLGSVAIAAAMTVSLISTSVYAAAPAVNAEYKSRFDTMYQKIKDPSNGYFSTEGIPYHSIETLLVEAPDYGHVTTSEAFSYYMWLEAMKGRFSGDFTGFGKSWDIAEKYIIPSSQDQPNSSMSKYDPNKPATYAPEYETPNQYPAKLDTGAAVGKDPISKELVSAYGTNMIYGMHWILDVDNWYGYGLRADGKSRPSYINTFQRGEQESTWETIPQPCWDGMNFGGKNGYLDLFTGDNSYSKQFKYTDAPDADARAVQATYWADQWAKMQGKDVSTYVGKATKMGDYLRYSMFDKYFRKIGSPQTAGTGYDAAHYLLSWYYAWGGGIGSDWAWVIGSSHNHFGYQNPMAAWILSSDATFKPKSTNGASDWGKSLSRQIEFYQWLQSAEGAIAGGASNSNKGRYEAWPSSTATFYGMGYTANPVYADPGSNTWFGMQVWSMQRMAEYYYQTKDSKVKSLLDKWAKWANSTIQFNADGTFQIPSTIDWSGQPDTWNGTYTGNPNLHVTVVNSGADLGVASSLANTLAYYAAASGDATSKTNAKKLLDGMWNNYQDSKGISVPETRNDYHRFLDQEVYIPSGWTGTMPNGDKIQSGIKFIDIRSKYKQDPDWARVEADLKAGKSPTMVYHRFWAQSEFAIANGVYAILFPEPDPVELLGDVNADNAVDAIDLAVLKKFLLDSTTTINSKNADMNADGVVDAIDLAKLKIKLLSGI

SEQ ID NO: 173 - DNA, 3009 bp, Unknown
  Obtained from environmental sample
gtgagtggagaggtaagtggtatttcacaggcaaggaaccgactgatgaataaaaagttaaataaaaaaggaggtcatcgtaagatgagtaagaaagttattagcaaaagcacagacaaatatcaaaacagatttttagaactctggggagacattaaggatccgaaaaacgggtatttcagtaacaaaggcattccatatcattcgattgagactatgattgtagaagctccggactatggacacgtaacgacaagtgaaactctcagctactatatgtggcttgaggcaatgtatggaaagttcacaggagatttcagcggatttaaaacagcctgggacacagcagaagcctatatgattccaacggaaaaagaccagcccgaatccagcatgagtaaatattcagccagcaagcctgctacttatgctccggaatgggaattgccagacttatatcctgcccagctgaattttggtgcagctgttggaactgacccgatcaatagtgaactggcggctacatacggcagcaataccatgtatggaatgcattggttattagatgcagataactggtacggttttggaagcagaggcgacggtgtgtcaacaccatcctacatcaatacgttccagagaggcgaacaggagtctacctgggagaccatccctcagccatgctgggaaacaatgaaatacggcggcaagaatggatatcttgatctgttcaccggagacagcagctattcaaagcaatttaaatataccgatgcacctgatgcagacgcccgtgcaatccaggctacttactgggcaaataaatgggcgcaggaatatggcgttgaccttggaacctataattccaaagccagcaaaatgggtgattatttaagatatgccatgtttgataaatacttccgtaaaatcggtactccgtcagctgctggtaccgggtatgatgctgctcattatctcatgtcctggtattatgcatggggcggcggagtaggttccgactgggcatggaaaatcggagacagccataaccactttggatatcagaatcctatgacagcctggatattatcagaagatgaagatttaaagcccctgtctaaaaagggagccagcgactggaagttaagtcttgacagacagctggaattctatcagtggctgcagacagctgagggtgcaattgcaggtggagccagtaactcccataatggccgttatgaagaatggccggcaggtacctcaaccttttatggaatgggatatgtagcaaatcctgtctatgcagatcctggaagtaatacatggtttggtttccaggcatggtccatgcagcgtgtggctgaatactattacaaaactaaagatgaaagagcagaagctattctggataaatgggttggctggattaaaactgtggtacagctgaaaccagacggaacatatgcaattcctaacggtcttgactggtccggacagcctgatacctggacaggtacttatacaggtaataagaacctgcatgtaactgttaccagctacaccacagaccttggtgttacaggttcccttgcaaataccttattgtattacagcaaggcatctggtgatgatgaagcaagagtgctggcaaaggaattactggatcgtatgtgggatctgtacagagatgataagggtctttcaacgccagaaccaagaacagattacaaacggttctttgaacaggagatctacgtaccagcaggctggaccggaaaaatgccaaatggggatgtaattaaatccggtgttaaatttttagacattcgttccaaatataaagatgatccggattatgagaaaattcttactgcttataacaatgatactgatcctgtatttaactaccaccgtttctgggcacagtgcgatatcgccattgcaaatggtgtatattccctgctgtttggagaaggcggtgaaccagtcactaactctgcaatcaaccctgtaactgcagcgtttgataagaatattgcggaacagacagatataacagttgagcttaccttaaatggtaatacgtttaccggcattaaggacggaagtacttatttaacggaaggcaccgattataccttatccgacaatacagtcattttattaaaagaatacttagcaggtcaggatgtcggtaagttaaagcttgtttttgatttcaataagggagttgatccggtactgacagtaacgatcactgattccacaccaggcggttctgtgaaacctgccgcagccacctttgataagaaccccgcaaagcaggcagatgttacagctgttttaactatggcaggacatacactgaaagggatcaggctgaatagcaaagagttagctgaaggcgtggattataccatatccggaacttccgttactttcttaaaagcttcactggctggtcttgctacaggaatctacaatgtagtattcgatttaagcgcaggaacagaccctgtgatggttctgactgtagtagatacttctgttgcaaaaggcagcataaagatacagatgtataatgcaaacacatcagcacagagcggttctctcagtccgaaattcaagatttacaataacggcacaaccaatgtaaaactttctgatgttaaaatcagatattattacacgataaacggagaaattgatcaaaacttctggtgtgactggtcttccgttggcagcagcaatattaccggaaccttagttaaattctctgctccaaagaaggatgctgattattatctggaaattggatttacatctggagcgggaagtctggcagcaggagagtatgcggagatacagataagagtgacgaaagctaactggacgaattatactcagacagatgattattcctttgatggcacagcaatgaactatgtggattcgccaaaagttactggatatatatctaacagcctgaaatggggaattgaaccttaa

SEQ ID NO: 174 - protein, 1002 aa, Unknown
  Obtained from environmental sample
MSGEVSGISQARNRLMNKKLNKKGGHRKMSKKVISKSTDKYQNRFLELWGDIKDPKNGYFSNKGIPYHSIETMIVEAPDYGHVTTSETLSYYMWLEAMYGKFTGDFSGFKTAWDTAEAYMIPTEKDQPESSMSKYSASKPATYAPEWELPDLYPAQLNFGAAVGTDPINSELAATYGSNTMYGMHWLLDADNWYGFGSRGDGVSTPSYINTFQRGEQESTWETIPQPCWETMKYGGKNGYLDLFTGDSSYSKQFKYTDAPDADARAIQATYWANKWAQEYGVDLGTYNSKASKMGDYLRYAMFDKYFRKIGTPSAAGTGYDAAHYLMSWYYAWGGGVGSDWAWKIGDSHNHFGYQNPMTAWILSEDEDLKPLSKKGASDWKLSLDRQLEFYQWLQTAEGAIAGGASNSHNGRYEEWPAGTSTFYGMGYVANPVYADPGSNTWFGFQAWSMQRVAEYYYKTKDERAEAILDKWVGWIKTVVQLKPDGTYAIPNGLDWSGQPDTWTGTYTGNKNLHVTVTSYTTDLGVTGSLANTLLYYSKASGDDEARVLAKELLDRMWDLYRDDKGLSTPEPRTDYKRFFEQEIYVPAGWTGKMPNGDVIKSGVKFLDIRSKYKDDPDYEKILTAYNNDTDPVFNYHRFWAQCDIAIANGVYSLLFGEGGEPVTNSAINPVTAAFDKNIAEQTDITVELTLNGNTFTGIKDGSTYLTEGTDYTLSDNTVILLKEYLAGQDVGKLKLVFDFNKGVDPVLTVTITDSTPGGSVKPAAATFDKNPAKQADVTAVLTMAGHTLKGIRLNSKELAEGVDYTISGTSVTFLKASLAGLATGIYNVVFDLSAGTDPVMVLTVVDTSVAKGSIKIQMYNANTSAQSGSLSPKFKIYNNGTTNVKLSDVKIRYYYTINGEIDQNFWCDWSSVGSSNITGTLVKFSAPKKDADYYLEIGFTSGAGSLAAGEYAEIQIRVTKANWTNYTQTDDYSFDGTAMNYVDSPKVTGYISNSLKWGIEP

SEQ ID NO: 175 - DNA, 2646 bp, Unknown
  Obtained from environmental sample
atgcaaaaagaatcattaaaagagcccacaggcgattaccagaaaaggttcctggaattatgggagatactccacgattccgaaaatggatatttcagtccccagggagtcccctatcacagcatagaaactctgatagttgaagcccccgactacggtcatgtaacaaccagtgaaacgctaagctattatatctggcttgaagccatgtatggcaaatttaccggtgatttctctggttttaaaaaagcatgggatattgcagaaacctatatcatccccacagaaaaagaccagcccaatagcagtatgtctggatacaatgccagtaaacccgccacctatgcccctgaatgggagctgcctagtctttatccggcgaaattggattctggcgcagcggtagggacagatccaatctataacgatttaaaatcaacctatggctcttctgttatttacggcatgcactggctcttagatgcggacaactggtatggtttcggcagacggggagatggcaagtctgcaccgtcttatatcaataccttccagagaggaagagaggaatccacctgggagacaattcctcagccgtgttgggatgacatgcgtttcggtggtaaaaacggattcctggatctgtttaccggagacagtaattatgcaaaacagtttaaatataccgatgcacccgatgcagattcgcgggcaatacaggcgacatactgggcagagcaatgggccagtgaatatggggtggatcttgaaacctatattggcaaggcaagcaaaatgggtgactatttaaggtatgccatgtttgataaatacttccgtaaaattggatcaccagctgctgccggtaccggatacgaaggggctcattatctgctcagctggtattatgcatggggtggcggcgagaacgcaaactggtcctgggtaattggatgcagtcacaaccattttggttaccagaatcccatggcagcctggatattgtcacagaatgatgaattcaatccactttcccgcaatggcgtaagtgactggagtaagagtcttgagagacagctggaattctatcagtggctgcagtccgaagaaggcggcatagcgggcggtgtctccaattccaataacggccgttatgaaagctggccttcaggaaccgcgaccttttatggaatgggctatcaggaacaccctgtatatgctgatccgggaagcaaccggtggtttgggttccaggcatggtcaatgcagcgtgtagcagagtattattacaaaacaaataatttaaaggcaaaagcattactggaaaaatgggttaaatggattaaaacagtagtaaaactggaggcagacggaacctttgcgattcccgataatttagactggtcaggccagcctgaaacttggacaggaacctataccggaaatcccaatctgcatgtaaaagtaagcacctatggcactgaccttggcgtggcaggctctcttgccaataccttactgtattacagtaaagcttctggtgacgatgcggccagagtacttgccaaggaattattagaccgtatgtggaatttatacaaaggcgataaagggctttctgttcccgaacaaaggaatgactacagccgtttctttgatcaggaagtctatgtaccgtctggctggacaggaaacatgccaaacggagatgaaattaaatcgggagttaagtttatagatatccgttctaaatataaagacgatcctgattttcagaaggttcaggatgcttacaacaacggaaccgctccggtattaaattaccaccgcttctgggcacagtgtgatatagctattgctaacggtgtatattccatgctgtttgaagaaggcggagaggcggtaaacaactctgccattgatcccacatcagcagtttttgacaaaaaggaaggcagccagaaagacattaaagtcatcctttccttaaacggaaatacttttacggggatcaaagagggaaatagatatttaacagagggtgtggagtacaccttaaccgatgatacagttgtattattaaaaacttatctggcagaaaaagaagtcgggatattaaagctcaccttcgatttcagcgcgggaactgacccggtacttgtcctgactgtgacagattcttcaatagcatccggagacatcaaagtacaaatgtataacgatgttacaacagcacaggtaagttcgattgtaccgaaaattaaaatcaccaataccggaaaaaccagtatatcacttaaagatttgaaacttagatactattacaccatagatgaagaaaaggaccagaatttctggtgtgactggtctacagtcggcgacagtaatgtaacaggtacctttgtgaaaatggcgaatgcaaagccaggtgcagattattacctggagatcggatttacagctggagccggtgacctggcagcggatcagtccattgaagtgccggtaaggttttctaaaattgattggagcagttatacgcagacaggagattattccttttcaaaatcaggcggcagttatgcagactggacaaaaattacaggatatatttcaggcagcctgaaatggggagtggaaccgtaa

SEQ ID NO: 176 - protein, 881 aa, Unknown
  Obtained from environmental sample
  DOMAIN (13)...(628): Glycosyl hydrolase family 48
MQKESLKEPTGDYQKRFLELWEILHDSENGYFSPQGVPYHSIETLIVEAPDYGHVTTSETLSYYIWLEAMYGKFTGDFSGFKKAWDIAETYIIPTEKDQPNSSMSGYNASKPATYAPEWELPSLYPAKLDSGAAVGTDPIYNDLKSTYGSSVIYGMHWLLDADNWYGFGRRGDGKSAPSYINTFQRGREESTWETIPQPCWDDMRFGGKNGFLDLFTGDSNYAKQFKYTDAPDADSRAIQATYWAEQWASEYGVDLETYIGKASKMGDYLRYAMFDKYFRKIGSPAAAGTGYEGAHYLLSWYYAWGGGENANWSWVIGCSHNHFGYQNPMAAWILSQNDEFNPLSRNGVSDWSKSLERQLEFYQWLQSEEGGIAGGVSNSNNGRYESWPSGTATFYGMGYQEHPVYADPGSNRWFGFQAWSMQRVAEYYYKTNNLKAKALLEKWVKWIKTVVKLEADGTFAIPDNLDWSGQPETWTGTYTGNPNLHVKVSTYGTDLGVAGSLANTLLYYSKASGDDAARVLAKELLDRMWNLYKGDKGLSVPEQRNDYSRFFDQEVYVPSGWTGNMPNGDEIKSGVKFIDIRSKYKDDPDFQKVQDAYNNGTAPVLNYHRFWAQCDIAIANGVYSMLFEEGGEAVNNSAIDPTSAVFDKKEGSQKDIKVILSLNGNTFTGIKEGNRYLTEGVEYTLTDDTVVLLKTYLAEKEVGILKLTFDFSAGTDPVLVLTVTDSSIASGDIKVQMYNDVTTAQVSSIVPKIKITNTGKTSISLKDLKLRYYYTIDEEKDQNFWCDWSTVGDSNVTGTFVKMANAKPGADYYLEIGFTAGAGDLAADQSIEVPVRFSKIDWSSYTQTGDYSFSKSGGSYADWTKITGYISGSLKWGVEP

SEQ ID NO: 177 - DNA, 2589 bp, Unknown
  Obtained from environmental sample
ttgccgacgcagtctgatagcaaggaggttagtgtgaatcgtaaaaggattttgcgcaccgcgtcgctggcgctggtgatgctcgccctcctagctggaggagtacttggcctgcagcagctagcagttacccgggcagccaaccagagcgccagtgctgcccaagccacatcggtctacacgcaacgctttctgacgctctataacgagatcaagaacccggcgaacggttacttcagctcgccgggaattccctaccactcagtggagactctgatcgttgaggcccctgactactggcacgagacgacctctgagaccttcagcttctggatctggctggaggcgacctatggcgaggtgacgggcaactggcagcccttcatcaacgcctggcagacaatggataagtatatgattccggcgcattcggaccagccgaccaacagtggctacaaccctagcagcccggcccagtatgcgccggagtcgcccaatatcaccgactatccaacccagctcgattcaagcgtatcagttggacaagatccgcttttcaacgaactgcagcagacctacggcacgcctgacatctacggcatgccttggcttctcgacactgataactggtacggctacggccactgcggcgacggcacgaccaagccttctttcatcaactcctaccagcgtggctcatcggagtcggtctggaagagggtcgtgcatcccgagtgtgagaccttcacctggggcagcaacgacggtaccggcttcctgagtcttttcaataagccagcccctggcggcagctatcagcaacagtggcgctacactgacgcccctgacgccgatgcgcgtaccattcaggccgcctactgggcctatacgtgggccagcgctcagggtcaggccagcgcgatctccgcgcagatcgccgaggctgccaagatgggcgactatctgcgctacagcctgttcgataagtactttaagacgatgggctgtcagagtccgagctgtccggcaggctctggcaagaacagcgctacctatctgcttggctggtactatgcctggggcggcgccctgccttctgcaggtaactgggcctggcgcatcggctccagctctgcccaccagggctatcagaaccccctggccgcctgggctttaagcaacgtgcccgcccttgagccaaagtcgccgactgcgccgagcgactgggcgacgagcctgcagcgtcagctgcaattctatcagtggctccagtccgccgaaggcgctattgctggcggggccactaatagctgggatggtcactacggaaccccaccagccggtgatccaactttctatggcatggcctacgactgggagccagtctatcatgatcctcccagcaataactggtttggcttccaggcctggtcgatggagcgcctggccgagtactactatgtgaccggcaatgcgaccgccaagtcgatcctcgataagtgggtcgcctgggccaagtcggtgacaacggtcaactcgaacggcacttactcgatcccctccaccctcaactggagcggccagccctcacaaaactggacggcgaactcgacgcctgtgaccaataccaacctgcacgtgacggtggtcgatagaaccacggacgtgggcgtgacagcagcgctggccaagacgctgctcttctacgccgccaagtcgggcgatacctcttcgcgtacgttggcgcagacgctgctcgacgatatgtggaacaactattcggatagcatcggcgtctctaatcctgagacccgcaccgactataaccagttcaatgactctgtgtatatcccctcgggctggaccggtaagaacgcccagggcgcaaccctgaactcgtcaacaaccttcctgaccgagcgtccgaagtatacacaagacccgaactggcccaaggtgcaggcgtatctgaatggcggcccggctcccacgttcaactaccatcgcttctgggcccaggccgatatcgcgatggccatggccgacgtcgatatcctcttcccgccctcatcttctgggacgccgccccccacggctacggccactagcacgccggctgtgacgccaacggcgacctccaccccgcggcctaccgtgacacccactgccaccccaacggcgacggcgaccagcacgccgacgcctactccgacgccacggcctactgtgacgccgaccccgagcccgacgcctacggcgggcctgagctgtcgggtgcagtacgtgatcacgggccagtggccaggaggctttggggcgatgattaacatcacgaatacggggacgacgacgatcaacggctggacgttgcagtttagtttcccgaacgggcagacggtgacgcaggggtggaatgggagctttagccagtcggggagcacggtgacggtgacgaacctgtcctacaacgggatgatcccgccggggacgacgctgagcaatgcgccgggcttcaacgggacgtggacagggacgaactcgccgccgacctcctttacactcaatggcgtcacctgtagtacttcctga

SEQ ID NO: 178 - protein, 862 aa, Unknown
  Obtained from environmental sample
MPTQSDSKEVSVNRKRILRTASLALVMLALLAGGVLGLQQLAVTRAANQSASAAQATSVYTQRFLTLYNEIKNPANGYFSSPGIPYHSVETLIVEAPDYWHETTSETFSFWIWLEATYGEVTGNWQPFINAWQTMDKYMIPAHSDQPTNSGYNPSSPAQYAPESPNITDYPTQLDSSVSVGQDPLFNELQQTYGTPDIYGMPWLLDTDNWYGYGHCGDGTTKPSFINSYQRGSSESVWKRVVHPECETFTWGSNDGTGFLSLFNKPAPGGSYQQQWRYTDAPDADARTIQAAYWAYTWASAQGQASAISAQIAEAAKMGDYLRYSLFDKYFKTMGCQSPSCPAGSGKNSATYLLGWYYAWGGALPSAGNWAWRIGSSSAHQGYQNPLAAWALSNVPALEPKSPTAPSDWATSLQRQLQFYQWLQSAEGAIAGGATNSWDGHYGTPPAGDPTFYGMAYDWEPVYHDPPSNNWFGFQAWSMERLAEYYYVTGNATAKSILDKWVAWAKSVTTVNSNGTYSIPSTLNWSGQPSQNWTANSTPVTNTNLHVTVVDRTTDVGVTAALAKTLLFYAAKSGDTSSRTLAQTLLDDMWNNYSDSIGVSNPETRTDYNQFNDSVYIPSGWTGKNAQGATLNSSTTFLTERPKYTQDPNWPKVQAYLNGGPAPTFNYHRFWAQADIAMAMADVDILFPPSSSGTPPPTATATSTPAVTPTATSTPRPTVTPTATPTATATSTPTPTPTPRPTVTPTPSPTPTAGLSCRVQYVITGQWPGGFGAMINITNTGTTTINGWTLQFSFPNGQTVTQGWNGSFSQSGSTVTVTNLSYNGMIPPGTTLSNAPGFNGTWTGTNSPPTSFTLNGVTCSTS

SEQ ID NO: 179 - DNA, 4806 bp, Unknown
  Obtained from environmental sample
atgcttcagcagttcaattcctcccgctggcgcagtagcgttcggcgattgagcgggtaccttaccgtgctcgcagccctgcttttgaccctggtcgcgcccagtgcgcgcgctactacggcttgtaatgtcacctacaccattgccagccagtggggcggtggttttggcgccgccgtcgccatccagaacaccggcaccacggcctggagcagttggtctctcacctggaccttcgccaatggccagaccatctctcagctttggaatggcagcgaatcgcagagcggcgcaaatgtcaccgtcgccaacctggggtataacggcagtgtcgctgccggggcaaccctcaccggcatgggcttcaacggcacatggaacaatgtcaccaacgccgtgcccacctcctttgccgtcaacggcgtcacctgcggcgcggcttcgacgttgaccgcgacgacaaccacgctgagttcttcaacgaccaccccgacggtgggcagcagcgttacgctgacggcgacagttgcgccctcggcggctaccggcacggtgaccttctatgatggcaccacggccctcggaaccggcacgctcagcagtggcgtggccacattgtccacctccttcacgaccgtagccacgcattcgatcaccgctgtctacgcgggttcgacgacgtacgccaccagcacctcgagcgcggtcagcctggtggtttccgccgcaacgccgactgcgacgacgaccacgctggcagcttctaccaccacgccgacggccggggccagcttcacgctgacggcgacagtctcgccttctgcggctaccggaacggtgaccttctatcagggcacgacctcgctcggaaccggcactatcagctccggcgtggccacgctctctacctccatcgctacagcgggcacgtactcgctgaccgctgtctatgcgggctcaacaacgtatgccaccagcacctcgagcgcggtcagcgttacggtagctgcggccgcaaagaccgcgacgacgactacgcttgcggcttccaccaccacgccgacggccggggccagcttcacgctgacggccacagtctcgccctcggcggctaccggcacggtgaccttctaccagggcacgacctcgctcggaaccggcaccatcagctccggcgtggccacgctctccacctccatcgccacagcgggcacgtactcgctgaccgctgtctatgcgggctcaacaacgtatgccaccagcacctcgagtgctgtcagcatcacggtagcagcggcaacgccgactgcgacgacgaccacgctggcggcttccaccaccacgccgacggccggcgccagcttcacgctgacggcgacagtctcgccctcggcggctaccggcacggtgaccttctatcagggcacgacctcgctcggaaccggcaccatcagctccggcgtggccacgctttctacctccatcgccactgccggcacgtattcgctgaccgctgtctatgcgggctcaacgacgtacgccaccagcacctcgagcgcggtcagcgttacggtagctgcggccgcaaagaccgcgaccacgaccacgctggcagcttccaccaccacgccgacggccggggccagcttcacgctgacggcgacagtctcgccttctgcggccaccggcacggtgaccttctaccagggcacgacctcgctcggaaccggcaccatcagctccggcgtggccacgctttccacctccattgccacagcgggcacgtactcgctgaccgctgtctatgcgggttcaacgacgtatgccaccagcacctcgagcgctgtcagcgttaccgtagctgcggcttcgtcctcctcggcctgctcggtgacttacaccatctcgccacagaactccagcgcatttggcgcggctctgaccgtcaacaacaccagcagcacagcctggaccagttgggttctcacctggagcttcgccaacggacagacggtttcgtctctgtggaatggcgttgagtcgcagagcggcaccaacgttacggtaagcaacgagagctacaacggcagcgtcgccgccggcggcagcctcaccggcatcggcttcaacggcacctggaatggcgtcaccaatgccgtgcccaccaacttcgcagtcaacggcgtttcgtgcggcggctcctccagcaccggcagcttcacgctggcctcctcgccgagcactctttcggttggtcaaggttccacagccactgatacgatcgccgttactgacgtgggctccttcagcggcagcgtcactctagctgtctctggcttgccgacgggagttaccgcggtgatcggcaccaaccccaccaccggaagcagcgtgatcaccttcacggcggccagcacggccacagtgacaactacgccagcgaccgttaccatcactggtacgtcaggcacgcaaacggccaccaccaccattgccctctccgttacaggtccatccagcttcacgctggcctcctcgccgacggcgctaagcgttgtggttggcgagagcggcaccgacaccattacggtcaccgacgtgaacagcttcagcggcagcgtaactcttgctgttactggcctgcccacaggcgtgactgcaaccatcggcaccaatccgaccacctcgaccagcgtcatcaccttcacggcggccagcacagccacggcaactactacgccggccaccattaccgtcaccggaacctcgggcacgctgagcgccactgcgagcatcgcgctgacggttacggccaacacctacaccgccttccagcagcacttcctcgatctgtatgctgattatcacaacacggccaacggatacttcagctccaacaacattccatatcactctgtggaaacgctgatcgccgaagcgcctgattacggccacgagacagtctctgaaacgtacagctactggatctggctcgaagcgctttatggcggacttacacagaactggaccccgttgcagaccgcgtggaccagccttgaaacctacatgatccccgacgcggctgatcagccgaccaacagcagctacaatgcctcatcgccggcaacctatgcgccggaaggagacagcccgagcgattatcctgcccagcttacctcctcggtctcggtgggtacagatcctctcgccagccaactcagcgccacttacggcacatccaacatctatggcatgcactggattatcgataccgataactggtacggctatggacaaaacgaggacggtgttacgaagccttcctgcatcaataccttccagcgtggagcaaatgagtcggtttggctgacggttccacagccctgctgggacatcttcaagtatggaaactccgccagcggctatctcagtctcttcacctctggcccctggtcgcagcagtggaagtacaccgatgctccggacgccgatgcgcgcgcggtgcaggccatgtactgggccgatcagtatgctaccgcgcagggcggcagcagcattgtcacggctctgctccccaaggccgccaagatgggcgattacctccgctactcgatgtttgacaagtacttcaagcagatcggctgcaccagcacctcttgcgcggcaggcaccggctacaacgcggcgcactacctgctctcctggtactacgcatggggcggttcggtttccaccagtggcggttgggcatggcgcatcggcgacggcgcggcgcatttcggctatcagaatcccgtggccgcttatgcactggctaacgattcagacttctccctgcccactcggtccaagactgactggtccaccagccttgagcgtcaattggagttctatcgctggttgcagtcggatgaaggcgccattgccggcggtgccaccaacagttgggatggcgcgtatgctaccccgcccacaggcgacaccactttctacggcatggcttatgattgggagccggtctatcacaacccgcccagcaaccagtggtttggcatgcaggtctggtcgatggagcgcttcgccgagtattactacatcaccggagacgccaaggccaagatcgtgctcgatccctggatcaagtgggtcgaaggcgtaaccactgtcaactccaatggcaccttcacgctgcccggttcgctctgctggaactcggcgcctggacagtccactgcggtctataacgacgcaacctgccccaccaccacgggctctactcttaacgagccctccctcaactggagcgccacgacacaggactggaccaccgttcctctgaaccccaacctccacgtaacagtagtgggaaccgctactgacatcggcgaagctggatcgctggccaaggcgctgagctactacagcgcaggcgttggcaagtgggtcggaaccaacgatgccacctcggaagccctggccaagagcctgctcaccggcatctggaccaactaccgcgactcgatcggcatctccgcaacggaaacccgcacggactatagcaacttcaacgaagccatctatattccttcgggttggacgggcaccatgcctagcggcgatcccatcaactccaactccaccttcctcagcattcgtaccccgtacgaaagcgactcagcatattccaaggtggaaacctatctcaacggcggagctgctccgaccttcaactatcaccgcttctgggcgcaggtcgacatcgcctccgcctatgaagtcttcgccaacctcttcccaggtaactaa

SEQ ID NO: 180 - protein, 1601 aa, Unknown
  Obtained from environmental sample
  SIGNAL (1)...(38)
MLQQFNSSRWRSSVRRLSGYLTVLAALLLTLVAPSARATTACNVTYTIASQWGGGFGAAVAIQNTGTTAWSSWSLTWTFANGQTISQLWNGSESQSGANVTVANLGYNGSVAAGATLTGMGFNGTWNNVTNAVPTSFAVNGVTCGAASTLTATTTTLSSSTTTPTVGSSVTLTATVAPSAATGTVTFYDGTTALGTGTLSSGVATLSTSFTTVATHSITAVYAGSTTYATSTSSAVSLVVSAATPTATTTTLAASTTTPTAGASFTLTATVSPSAATGTVTFYQGTTSLGTGTISSGVATLSTSIATAGTYSLTAVYAGSTTYATSTSSAVSVTVAAAAKTATTTTLAASTTTPTAGASFTLTATVSPSAATGTVTFYQGTTSLGTGTISSGVATLSTSIATAGTYSLTAVYAGSTTYATSTSSAVSITVAAATPTATTTTLAASTTTPTAGASFTLTATVSPSAATGTVTFYQGTTSLGTGTISSGVATLSTSIATAGTYSLTAVYAGSTTYATSTSSAVSVTVAAAAKTATTTTLAASTTTPTAGASFTLTATVSPSAATGTVTFYQGTTSLGTGTISSGVATLSTSIATAGTYSLTAVYAGSTTYATSTSSAVSVTVAAASSSSACSVTYTISPQNSSAFGAALTVNNTSSTAWTSWVLTWSFANGQTVSSLWNGVESQSGTNVTVSNESYNGSVAAGGSLTGIGFNGTWNGVTNAVPTNFAVNGVSCGGSSSTGSFTLASSPSTLSVGQGSTATDTIAVTDVGSFSGSVTLAVSGLPTGVTAVIGTNPTTGSSVITFTAASTATVTTTPATVTITGTSGTQTATTTIALSVTGPSSFTLASSPTALSVVVGESGTDTITVTDVNSFSGSVTLAVTGLPTGVTATIGTNPTTSTSVITFTAASTATATTTPATITVTGTSGTLSATASIALTVTANTYTAFQQHFLDLYADYHNTANGYFSSNNIPYHSVETLIAEAPDYGHETVSETYSYWIWLEALYGGLTQNWTPLQTAWTSLETYMIPDAADQPTNSSYNASSPATYAPEGDSPSDYPAQLTSSVSVGTDPLASQLSATYGTSNIYGMHWIIDTDNWYGYGQNEDGVTKPSCINTFQRGANESVWLTVPQPCWDIFKYGNSASGYLSLFTSGPWSQQWKYTDAPDADARAVQAMYWADQYATAQGGSSIVTALLPKAAKMGDYLRYSMFDKYFKQIGCTSTSCAAGTGYNAAHYLLSWYYAWGGSVSTSGGWAWRIGDGAAHFGYQNPVAAYALANDSDFSLPTRSKTDWSTSLERQLEFYRWLQSDEGAIAGGATNSWDGAYATPPTGDTTFYGMAYDWEPVYHNPPSNQWFGMQVWSMERFAEYYYITGDAKAKIVLDPWIKWVEGVTTVNSNGTFTLPGSLCWNSAPGQSTAVYNDATCPTTTGSTLNEPSLNWSATTQDWTTVPLNPNLHVTVVGTATDIGEAGSLAKALSYYSAGVGKWVGTNDATSEALAKSLLTGIWTNYRDSIGISATETRTDYSNFNEAIYIPSGWTGTMPSGDPINSNSTFLSIRTPYESDSAYSKVETYLNGGAAPTFNYHRFWAQVDIASAYEVFANLFPGN

SEQ ID NO: 181 - DNA, 1455 bp, Unknown
  Obtained from environmental sample
atgaagtccaatcctcggcgcgaaactgtcagagtgcgcctccgccgcggtattacggcgttcgcgcacagcgtcgtatccccgaggcggacccattcaagacccgcgacatcgcgccgttccacccgcacattggccgccgccgcggccggcgtgctcgcctcggcactggtcctcgtcggtgcgggcgccgctccagcgagcgccgcccgggtcgccaaccccttcgtcggcgccacggcatacgtcaaccaggagtgggcggccaacgccagatcctccggcggcagcgcgatcgccaaccagccgacgttcgtctggatggaccgcatcgccgccatcgagggcgccaacggggccatggggctgcgcgatcacctcgatgccgccgtgtcgcagggtgccaacctgttccagatggtcacctacaacctgcccggcagggactgcgcggcgctggcctccaacggcgagctgaagctgggcgagctcaaccgatacaagaccgagttcatcgacccgatcgccgacgtcctcagcgacccggcgtacgccaacctgcggatcgtgaacgtcgtcgagatcgactcgctgccgaacctgatcaccaacaccaacggccggccgaccgccggcggcaccacgtgtgaccaggcgctgcaaagcggcgactacgtcaacggcgtcgcgtacgcgctggggacgctgggctcgatcgagaacgtctacaactacgtcgacatcggtcaccacggctggctcggctgggacgacaacttccagccgttcgccaacctgatgggccaggtcgtgcgcaccagcccgtccactcctgacgacctgttcggcttcgcctccaacgtggccaactacggtccgacgcacgagccgttcttcggcgtcggcgacgtcgtgggcggccggccgatccgcgaggtctcgggcggctggatcgacttcaaccgctacatcgacgaggcctccttcgtccgggcgtaccagccggtgctctcgtcggcgatcggtcacaacgtcagcatgatcatcgacacctcccgcaacgggtggggtggcccgagccggccgacggcgcgaagcacctcgaccgacccgatcacctacatggaccagtcgcgcaccgaccgcaggatccacctcggcaactggtgcaaccagtccggtgccgggatcggcgcgcggccggccggggctcccgagaccggtatcgacgccttcgtgtgggtcaagcctccgggtgagtccgacggcgccagctcggagatccccaacgacgagggcaagggctttgaccggatgtgcgacccgacgtaccccggcaacgcccgcaacgggaaccacatgcccggttcgctggcgaacgctccgctgtccggccattggttcgacgcgcagttccgccagctcgtcgccaacgccaacccggcgatcggctaa

SEQ ID NO: 182 - protein, 484 aa, Unknown
  Obtained from environmental sample
MKSNPRRETVRVRLRRGITAFAHSVVSPRRTHSRPATSRRSTRTLAAAAAGVLASALVLVGAGAAPASAARVANPFVGATAYVNQEWAANARSSGGSAIANQPTFVWMDRIAAIEGANGAMGLRDHLDAAVSQGANLFQMVTYNLPGRDCAALASNGELKLGELNRYKTEFIDPIADVLSDPAYANLRIVNVVEIDSLPNLITNTNGRPTAGGTTCDQALQSGDYVNGVAYALGTLGSIENVYNYVDIGHHGWLGWDDNFQPFANLMGQVVRTSPSTPDDLFGFASNVANYGPTHEPFFGVGDVVGGRPIREVSGGWIDFNRYIDEASFVRAYQPVLSSAIGHNVSMIIDTSRNGWGGPSRPTARSTSTDPITYMDQSRTDRRIHLGNWCNQSGAGIGARPAGAPETGIDAFVWVKPPGESDGASSEIPNDEGKGFDRMCDPTYPGNARNGNHMPGSLANAPLSGHWFDAQFRQLVANANPAIG

SEQ ID NO: 183 - DNA, 1761 bp, Unknown
  Obtained from environmental sample
atgaacagcaagggagctgtcatgaaattccataatggactcaagagaccagcgaccagggccttggtcgctgcggcgacggcactggcgacgatgaccggcatggtcgtcgccagtgccgggactgccagcgcggcgccgggttgttcggtcagctacagcaagaacgattggggttccggcttcaccgccaacatcacgatcaccaacaccggtgacgccatcacgtcatggacgctgcggttcagctacgcgggcaaccagaccgtgaccagcggctggaatgccacggtgacccagtccgggcagcaggtcaccgcggtcaatgccgcgcacaacggttcgctcgctaccggagccagcacgagtttcgggttcaacgccaactacagcggcacgaacacggacccgaccgcgttctcggtgaacaacgtcagctgtggtggaaccacgacaccgccgacggacccgaccgatccaactgatccgacggacccgccggacgatccgccgccgggcaaccgggtggacaacccgtacgcgggcgcgacgccgtacgtgaacccggactgggcggcgaacgcccgcagttccggcggcgcgggtatcgcgaaccagccgacgttcgtctggatggaccggatcgctgctatcgaaggcacgaccggtgctcgtggcctgcgggaacacctggatacggcggtcagccagggcgcgaacctgttccaggtcgtgatctacaacctgcccggccgggactgcgccgcgctggcctccaacggtgaactcggcccgacagacctcactcggtaccagcgggagtacatcgacccgatcgcggcgatcctggacgacccggcatacgcgaacatgcgcatcgtcgccgtcgtggagatcgactcgctgccgaacctggtcaccaacaccggcggccgggagaccgcgacaccgaactgcgacaccatgctggccaaccagaactaccagaacgggatcagctacgcgctggccaaactcggcgacgtcggcaacgtctacagctacctcgacctcggccaccacggctggctcggctgggacgacaacttcactccgttcgccgacctggtggcgaaccaggtggtcggccgcaacggagcgaccgcggcggacatccacgggttcatctcgaacgtggcgaactacggcccgacccacgagccgtacttcacgatcaacgactcggtcggcggcacgtcggtgcgtcagtccagctgggtcgactggaaccggtacgtggacgaggcgtcgttcgcgaaggcctacggcgacttgttcacccagcgcctcggccaccgagtcagcatcctgatcgacacatcgcgcaacggctggggcggttccgcccggccgaccgggcctggcccgacgacgtcggtggacgcctacgtcgacggcggccgaaccgaccgccgcatccacaccggcaactggtgcaaccagtccggcgcgggtatcggtgcccggccggcatcggcgccggaatccggcatcgacgcgttcgtctgggtcaagccgccgggcgaatccgacggcgccagcgaagaaatcccgaacaacgagggcaagggcttcgaccagatgtgcgacccctcgtacacgggcaacccgcgcaacggcaacaacccgtccggcgcgctggacaacgccccgctgtccggccactggttcgacgcccagttccgtcaactagtagccaacgccaacccgcccatcaactaa

SEQ ID NO: 184 - protein, 586 aa, Unknown
  Obtained from environmental sample
  SIGNAL (1)...(45)
MNSKGAVMKFHNGLKRPATRALVAAATALATMTGMVVASAGTASAAPGCSVSYSKNDWGSGFTANITITNTGDAITSWTLRFSYAGNQTVTSGWNATVTQSGQQVTAVNAAHNGSLATGASTSFGFNANYSGTNTDPTAFSVNNVSCGGTTTPPTDPTDPTDPTDPPDDPPPGNRVDNPYAGATPYVNPDWAANARSSGGAGIANQPTFVWMDRIAAIEGTTGARGLREHLDTAVSQGANLFQVVIYNLPGRDCAALASNGELGPTDLTRYQREYIDPIAAILDDPAYANMRIVAVVEIDSLPNLVTNTGGRETATPNCDTMLANQNYQNGISYALAKLGDVGNVYSYLDLGHHGWLGWDDNFTPFADLVANQVVGRNGATAADIHGFISNVANYGPTHEPYFTINDSVGGTSVRQSSWVDWNRYVDEASFAKAYGDLFTQRLGHRVSILIDTSRNGWGGSARPTGPGPTTSVDAYVDGGRTDRRIHTGNWCNQSGAGIGARPASAPESGIDAFVWVKPPGESDGASEEIPNNEGKGFDQMCDPSYTGNPRNGNNPSGALDNAPLSGHWFDAQFRQLVANANPPIN

SEQ ID NO: 185 - DNA, 1749 bp, Unknown
  Obtained from environmental sample
atgggccttcgctccgcctctggaggcagcaagatccgcctccggcgtggggtcgtcgcggccaccaccgcgttcgccatgtgcgtcatgctggcgggcgtcgtggtcaaccaggccagtgcggcgccgggttgccgggtcgactacaccgtcaaccaatggaacaccggtttcaccggcaacatcacgctcaccaacctcggtgacccgatcaccagctggcagctgggctggacgttcgccggcaaccaacagctcaaccagagctggagcagcagctacacccagaccggtcagcaggtcacgctgaccaacgccgcatggaacggcagtctcggtacgagcgcgtcgaccacgatgggcttcaacgccagctactccggcaccaacgcgacccccgcgcagttcacgctgaacgggacggtctgcaccggccaggtcgggccgacgcccaccgacaccggcacaccgacaccgacaccgaccgaaaccacgccggcgccgggcaacaagatggacaacccctacagtggcgcgcgcgtctacgtgaacccggagtggtctgccagagcggcggccgagccgggtggcagccggatctccaaccagccaacgggagtgtggctcgaccggatcgccgcgatcaacggcgcgaacggcgcgatgggcctggccgcccatctcgaccgggccgtctcgcagggcgcgaacctcgtccagatcgtcatctacgacctgccaggccgagactgtgccgcgctggcctccaacggagagctcgggccgacggagatcggccggtacaagacggagtacatcgacccgatcgcggcgatcttcgcccggccggcgtatgcgaacctgcggatcgtgacggtcatcgagatcgactcgctgccgaacctcatcaccaacgtcggcggccgcgcgggcgcgaccgagcagtgcaacacgatgcagcagaacggcaactacgtgaacggcatcggctacgcactcgccaagttcggtgcgttgccgaacgtctacaactacctggacgccggacaccacgcctggatcggctgggacgacaacttcggaccgactgccgacctgatggcgacggcggcacgcgcccagggcagcaatccgaacctcgtcacagggttcatcaccaacacggcgaactactccgcactcaccgagccgtacttcaccatcgacagcgcggtgaacggcacctcggtacgacagtcgacctgggtcgactggaaccgctacgtcgacgagttgtcgttcgcgcaggcgttccgcggccggctggtgcaggccggtttcccgcagaacatcggcatgctgatcgacacctctcgcaacggctggggcggttcggcacgtccgaccggtccgggaccgagcaccgacgtcaacgcgttcgtcaacggcggccggatcgaccgccggatccacgccggcaactggtgcaaccagtccggtgcgggcctcggcgagcggccgcggtcggcgccggcctccggaatcgacgcgtacgtgtggatcaaaccgccgggtgagtccgacggctcgagctcggcgattccgaacgacgagggcaagggcttcgaccggatgtgtgacccgacctacggcggcaacgcccggaacggaaacagcatgtccggcgcgctgcccaactccccgctgtcgggtcactggttctcggcgcaattccagcagctcatgcaaaacgccaacccgccgctatag

SEQ ID NO: 186 - protein, 582 aa, Unknown
  Obtained from environmental sample
MGLRSASGGSKIRLRRGVVAATTAFAMCVMLAGVVVNQASAAPGCRVDYTVNQWNTGFTGNITLTNLGDPITSWQLGWTFAGNQQLNQSWSSSYTQTGQQVTLTNAAWNGSLGTSASTTMGFNASYSGTNATPAQFTLNGTVCTGQVGPTPTDTGTPTPTPTETTPAPGNKMDNPYSGARVYVNPEWSARAAAEPGGSRISNQPTGVWLDRIAAINGANGAMGLAAHLDRAVSQGANLVQIVIYDLPGRDCAALASNGELGPTEIGRYKTEYIDPIAAIFARPAYANLRIVTVIEIDSLPNLITNVGGRAGATEQCNTMQQNGNYVNGIGYALAKFGALPNVYNYLDAGHHAWIGWDDNFGPTADLMATAARAQGSNPNLVTGFITNTANYSALTEPYFTIDSAVNGTSVRQSTWVDWNRYVDELSFAQAFRGRLVQAGFPQNIGMLIDTSRNGWGGSARPTGPGPSTDVNAFVNGGRIDRRIHAGNWCNQSGAGLGERPRSAPASGIDAYVWIKPPGESDGSSSAIPNDEGKGFDRMCDPTYGGNARNGNSMSGALPNSPLSGHWFSAQFQQLMQNANPPL

SEQ ID NO: 187 - DNA, 2676 bp, Unknown
  Obtained from environmental sample
atgataagcaaagaattatttaaacgtaattcggttacatcagataaaccaaaccaggcggccaaaattactgccaaaagcacggacgaatatcaaaacagatttatggaactttgggaagatattaaggacccgaaaaatggatatttcagtactaagggtattccatatcattctgttgagactttgattgtagaagctccggattatggacatgttactacaagtgaagctttcagctattatatgtggctggcggccatgtatggtaaattcacaggagatttcagtggattcaaaacagcctgggacacagcagaatcctacatgattccaacggaaaaagaccagcccgaatccagcatgaagaaatattcagccagcaagcctgctacttatgccccggaatgggaattgcccagcttatatccttcccagctgaattttagtgcagctgttggatctgatcctattaacagcgaactgtccgccacctacggcagcaataccatgtatggaatgcactggttattagatgtagataactggtacggctttggaagcagaggtgacggtgttacaaatccatcctatatcaatactttccagagaggtgaacaggaatctacctgggagacaataccgcagccatgctgggaagcaatgaaattcggcggcaggaatggatatcttgacttgtttacaggagacagcaactatgcaactcagttcaaatataccaacgcacccgatgcagatgcccgtgcagttcaggcaacttattgggctcaccaatgggctgatgaatatggcattgaccttaaaatctatgattccaaagccagtaagatgggtgattatttaagatattccatgtttgataaatacttccgtaaaatcggttctccgacagctgctggtaccgggcatgatgcagctcattatctgatgtcctggtattatgcatggggcggcggagtaagttccgactggtcatggaaaatcggatgcagccataatcactttggatatcaaaatcccatggcagcctggatactatcggaagatgaagatttaaaacccctctcccagaagggagcaagcgactggaagacaagtcttaacaggcagcttgaattctatcagtggctgcagtcttcagaaggtgcaattgccggcggagcaagcaactccaataacggccgttatgaagcatggccagcaagtgcatctaccttttatggaatgggatatgtggcaaatcccgtttatgcagatcctggaagcaatacctggtttggctttcaggcatggtccatgcagcgtgtagctgaatattattacaagacagatgatgacagagcaaaagctattatggacaaatgggtaagctggattaagtcagtggtacagctgaatgaagacggaacctttgctattccaaacggtcttgattggtcaggacagccggatacctggaccggtacttatacaggcaatccgaatctgcatgtgacaattaccagctacggcacagaccttggtgttgctggttcccttgctaatgccttactgtattatagcaaagcctctggtgatgatgattcaagagttctagccagggagttattagatcgtatgtggaatctgtacagagatgataaggggcttgcagcaccggagtcaagagcagactacaaacggctctttgatcaggaaatctatataccagctggctggacagggacaatgccaaatggcgatgtcattaaatccggagttaaatttctggacattcgttctaagtacaaaaatgatccggattacgaaaaagttcttactgcttataacaataataccgatccggtatttaactaccaccgtttctgggcacagtgcgatgtcgccattgcaaatggcgtatattccctgctgtttggaaatggcaatgatccagtaaacaactctgccataagccccgtaatcgcagcatttgataagaataattctgaacagaaagatatatcagtagcgcttaccctaaatggtaatactttaaccggtattaaggatggaaacacttacttaactgaaggtacagattataccttatcgggaagtactgtcattttatctaaaagctatctgtcaggtaagggtattggtgacttaaagcttgtttttgatttcagtaagggcgttgatccggtattaactgtgacaatcactgataccacaccaagcggctccgttacacctgtcgcagccacttttgataagaacgctacgaaacaggcggatattgcagctgtcttagatacagctggatatacactaaagggtattaaactggagaatagtgagctgatagaaggagcagattatacgatatccggaagtttagttactttcctaaaaacttctctggctggtcttgagaaaggaatctacaatgtagtatttgatttaagtgcaggaacagatcccgtaatgattctgacagtagtagatacttccattgcaaaaggcagtattaaaatacagatgtataatggaacgacatcagcgcaaagcatttctcttagtccgaaattcaagatctttaacaacggtacaaccggagtaaaactctctgatgtaaaagtcagatattatgatattggggtcataagttag

SEQ ID NO: 188 - protein, 891 aa, Unknown
  Obtained from environmental sample
MISKELFKRNSVTSDKPNQAAKITAKSTDEYQNRFMELWEDIKDPKNGYFSTKGIPYHSVETLIVEAPDYGHVTTSEAFSYYMWLAAMYGKFTGDFSGFKTAWDTAESYMIPTEKDQPESSMKKYSASKPATYAPEWELPSLYPSQLNFSAAVGSDPINSELSATYGSNTMYGMHWLLDVDNWYGFGSRGDGVTNPSYINTFQRGEQESTWETIPQPCWEAMKFGGRNGYLDLFTGDSNYATQFKYTNAPDADARAVQATYWAHQWADEYGIDLKIYDSKASKMGDYLRYSMFDKYFRKIGSPTAAGTGHDAAHYLMSWYYAWGGGVSSDWSWKIGCSHNHFGYQNPMAAWILSEDEDLKPLSQKGASDWKTSLNRQLEFYQWLQSSEGAIAGGASNSNNGRYEAWPASASTFYGMGYVANPVYADPGSNTWFGFQAWSMQRVAEYYYKTDDDRAKAIMDKWVSWIKSVVQLNEDGTFAIPNGLDWSGQPDTWTGTYTGNPNLHVTITSYGTDLGVAGSLANALLYYSKASGDDDSRVLARELLDRMWNLYRDDKGLAAPESRADYKRLFDQEIYIPAGWTGTMPNGDVIKSGVKFLDIRSKYKNDPDYEKVLTAYNNNTDPVFNYHRFWAQCDVAIANGVYSLLFGNGNDPVNNSAISPVIAAFDKNNSEQKDISVALTLNGNTLTGIKDGNTYLTEGTDYTLSGSTVILSKSYLSGKGIGDLKLVFDFSKGVDPVLTVTITDTTPSGSVTPVAATFDKNATKQADIAAVLDTAGYTLKGIKLENSELIEGADYTISGSLVTFLKTSLAGLEKGIYNVVFDLSAGTDPVMILTVVDTSIAKGSIKIQMYNGTTSAQSISLSPKFKIFNNGTTGVKLSDVKVRYYDIGVIS

SEQ ID NO: 189 - DNA, 4806 bp, Unknown
  Obtained from environmental sample
atgcttcagcagttcaattcctcccgctggcgcagtagcgttcggcgattgagcgggtaccttaccgtgctcgcagccctgcttttgaccctggccgcgcccagtgcgcgcgctactacggcttgtaatgtcacctacaccattgccagccagtggggcggtggttttggcgccgccgtcgccatccagaacaccggcaccacggcctggagcagttggtctctcacctggaccttcgccaatggccagaccatctctcagctttggaatggcagcgaatcgcagagcggcgcaaatgtcaccgtcgccaacctggggtataacggcagtgtcgctgccggggcaaccctcaccggcatgggcttcaacggcacatggaacaatgtcaccaacgccgtgcccacctcctttgccgtcaacggcgtcacctgcggcgcggcttcgacgctgaccgcgacgacgaccacgctgagttcttcaacgaccaccccgacggtgggcagcagcgttacgctgacggcgacagttgcgccctcggcggccaccggcacggtgaccttctacaacggcacgacctcgctcggaaccggcaccatcagctccggcgtggccacgctctccacctcgttcgcaaccgccggcacagagtcgatcaccgctgtctatgcgggttcgacgacgtatgccaccagcacctcaagcgcggtcagcatcacggtagcagcggcaacgccgactgcgacgacgaccacgcttgcggcttccaccaccacgccgacggccggcgccagcttcacgctgacggcgacagtctcgccttctgcggctaccggcactgtgaccttctatcagggcacgacctcgctcggaaccggcaccatcagctccggcgtggccacgctttccacctccatcgccacagcgggcacgtactcgctgacagctgtctacgcgggttcaacgacgtatgccaccagcacctcgagcgcggtcagcgttacggtagctgcggccgcaaagaccgcgacgacgactacgctggcagcttccaccaccacgccgacggccggggccagcttcacgctgacggcgacagtctcgccttctgcggctaccggcacggtgaccttctacaacggcacgacctcgctcggaaccggcaccatcagctccggcgtggccacgctctccacctccatcgccacagcgggcacgtactcgctgaccgctgtctatgcgggctcaacaacgtatgccaccagcacctcgagtgctgtcagcatcacggtagcagcggcaacgccgactgcgacgacgaccacgctggcggcttccaccaccacgccgacggccggcgccagcttcacgctgacggcgacagtctcgccctcggcggctaccggcacggtgaccttctatcagggcacgacctcgctcggaaccggcaccatcagctccggcgtggccacgctttctacctccatcgccactgccggcacgtattcgctgaccgctgtctatgcgggctcaacgacgtacgccaccagcacctcgagcgcggtcagcgttacggtagctgcggccgcaaagaccgcgaccacgaccacgctggcagcttccaccaccacgccgacggccggggccagcttcacgctgacggcgacagtctcgccttctgcggccaccggcacggtgaccttctaccagggcacgacctcgctcggaaccggcaccatcagctccggcgtggccacgctttccacctccattgccacagcgggcacgtactcgctgaccgctgtctatgcgggttcaacgacgtatgccaccagcacctcgagcgctgtcagcgttaccgtagctgcggcttcgtcctcctcggcctgctcggtgacttacaccatctcgccacagaactccagcgcatttggcgcggctctgaccgtcaacaacaccagcagcacagcctggaccagttgggttctcacctggagcttcgccaacggacagacggtttcgtctctgtggaatggcgttgagtcgcagagcggcaccaacgttacggtaagcaacgagagctacaacggcagcgtcgccgccggcggcagcctcaccggcatcggcttcaacggcacctggaatggcgtcaccaatgccgtgcccaccaacttcgcagtcaacggcgtttcgtgcggcggctcctccagcaccggcagcttcacgctggcctcctcgccgagcactctttcggttggtcaaggttccacagccactgatacgatcgccgttactgacgtgggctccttcagcggcagcgtcactctagctgtctctggcttgccgacgggagttaccgcggtgatcggcaccaaccccaccaccggaagcagcgtgatcaccttcacggcggccagcacggccacagtgacaactacgccagcgaccgttaccatcactggtacgtcaggcacgcaaacggccaccaccaccattgccctctccgttacaggtccatccagcttcacgctggcctcctcgccgacggcgctaagcgttgtggttggcgagagcggcaccgacaccattacggtcaccgacgtgaacagcttcagcggcagcgtaactcttgctgttactggcctgcccacaggcgtgactgcaaccatcggcaccaatccgaccacctcgaccagcgtcatcaccttcacggcggccagcacagccacggcaactactacgccggccaccattaccgtcaccggaacctcgggcacgctgagcgccactgcgagcatcgcgctgacggttacggccaacacctacaccgccttccagcagcacttcctcgatctgtatgctgattatcacaacacggccaacggatacttcagctccaacaacattccatatcactctgtggaaacgctgatcgccgaagcgcctgattacggccacgagacagtctctgaaacgtacagctactggatctggctcgaagcgctttatggcggacttacacagaactggaccccgttgcagaccgcgtggaccagccttgaaacctacatgatccccgacgcggctgatcagccgaccaacagcagctacaatgcctcatcgccggcaacctatgcgccggaaggagacagcccgagcgattatcctgcccagcttacctcctcggtctcggtgggtacagatcctctcgccagccaactcagcgccacttacggcacatccaacatctatggcatgcactggattatcgataccgataactggtacggctatggacaaaacgaggacggtgttacgaagccttcctgcatcaataccttccagcgtggagcaaatgagtcggtttggctgacggttccacagccctgctgggacatcttcaagtatggaaactccgccagcggctatctcagtctcttcacctctggcccctggtcgcagcagtggaagtacaccgatgctccggacgccgatgcgcgcgcggtgcaggccatgtactgggccgatcagtatgctaccgcgcagggcggcagcagcattgtcatggctctgctccccaaggccgccaagatgggcgattacctccgctactcgatgtttgacaagtacttcaagcagatcggctgcaccagcacctcttgcgcggcaggcaccggctacaacgcggcgcactacctgctctcctggtactacgcatggggcggttcggtttccaccagtggcggttgggcatggcgcatcggcgacggcgcggcgcatttcggctatcagaatcccgtggccgcttatgcactggctaacgattcagacttctccctgcccactcagtccaagactgactggtccaccagccttgagcgtcaattggagttctatcgctggttgcagtcggatgaaggcgccattgccggcggtgccaccaacagttgggatggcgcgtatgctaccccgcccacaggcgacaccactttctacggcatggcttatgattgggagccggtctatcacaacccgcccagcaaccagtggtttggcatgcaggtctggtcgatggagcgcttcgccgagtattactacatcaccggagacgccaaggccaagatcgtgctcgatccctggatcaagtgggtcgaaggcgtaaccactgtcaactccaatggcaccttcacgctgcccggttcgctctgctggaactcggcgcctggacagtccactgcggtctataacgacgcaacctgccccaccaccacgggctctactcttaacgagccctccctcaactggagcgccacgacacaggactggaccaccgttcctctgaaccccaacctccacgtaacagtagtgggaaccgctactgacatcggcgaagctggatcgctggccaaggcgctgagctactacagcgcaggcgttggcaagtgggtcggaaccaacgatgccacctcggaagccctggccaagagcctgctcaccggcatctggaccaactaccgcgactcgatcggcatctccgcaacggaaacccgcacggactatagcaacttcaacgaagccatctatattccttcgggttggacgggcaccatgcctagcggcgatcccatcaactccaactccaccttcctcagcattcgtaccccgtacgaaagcgactcagcatattccaaggtggaaacctatctcaacggcggagctgctccgaccttcaactatcaccgcttctgggcgcaggtcgacatcgcctccgcctatgaagtcttcgccaacctcttcccaggtaactaa

SEQ ID NO: 190 - protein, 1601 aa, Unknown
  Obtained from environmental sample
MLQQFNSSRWRSSVRRLSGYLTVLAALLLTLAAPSARATTACNVTYTIASQWGGGFGAAVAIQNTGTTAWSSWSLTWTFANGQTISQLWNGSESQSGANVTVANLGYNGSVAAGATLTGMGFNGTWNNVTNAVPTSFAVNGVTCGAASTLTATTTTLSSSTTTPTVGSSVTLTATVAPSAATGTVTFYNGTTSLGTGTISSGVATLSTSFATAGTESITAVYAGSTTYATSTSSAVSITVAAATPTATTTTLAASTTTPTAGASFTLTATVSPSAATGTVTFYQGTTSLGTGTISSGVATLSTSIATAGTYSLTAVYAGSTTYATSTSSAVSVTVAAAAKTATTTTLAASTTTPTAGASFTLTATVSPSAATGTVTFYNGTTSLGTGTISSGVATLSTSIATAGTYSLTAVYAGSTTYATSTSSAVSITVAAATPTATTTTLAASTTTPTAGASFTLTATVSPSAATGTVTFYQGTTSLGTGTISSGVATLSTSIATAGTYSLTAVYAGSTTYATSTSSAVSVTVAAAAKTATTTTLAASTTTPTAGASFTLTATVSPSAATGTVTFYQGTTSLGTGTISSGVATLSTSIATAGTYSLTAVYAGSTTYATSTSSAVSVTVAAASSSSACSVTYTISPQNSSAFGAALTVNNTSSTAWTSWVLTWSFANGQTVSSLWNGVESQSGTNVTVSNESYNGSVAAGGSLTGIGFNGTWNGVTNAVPTNFAVNGVSCGGSSSTGSFTLASSPSTLSVGQGSTATDTIAVTDVGSFSGSVTLAVSGLPTGVTAVIGTNPTTGSSVITFTAASTATVTTTPATVTITGTSGTQTATTTIALSVTGPSSFTLASSPTALSVVVGESGTDTITVTDVNSFSGSVTLAVTGLPTGVTATIGTNPTTSTSVITFTAASTATATTTPATITVTGTSGTLSATASIALTVTANTYTAFQQHFLDLYADYHNTANGYFSSNNIPYHSVETLIAEAPDYGHETVSETYSYWIWLEALYGGLTQNWTPLQTAWTSLETYMIPDAADQPTNSSYNASSPATYAPEGDSPSDYPAQLTSSVSVGTDPLASQLSATYGTSNIYGMHWIIDTDNWYGYGQNEDGVTKPSCINTFQRGANESVWLTVPQPCWDIFKYGNSASGYLSLFTSGPWSQQWKYTDAPDADARAVQAMYWADQYATAQGGSSIVMALLPKAAKMGDYLRYSMFDKYFKQIGCTSTSCAAGTGYNAAHYLLSWYYAWGGSVSTSGGWAWRIGDGAAHFGYQNPVAAYALANDSDFSLPTQSKTDWSTSLERQLEFYRWLQSDEGAIAGGATNSWDGAYATPPTGDTTFYGMAYDWEPVYHNPPSNQWFGMQVWSMERFAEYYYITGDAKAKIVLDPWIKWVEGVTTVNSNGTFTLPGSLCWNSAPGQSTAVYNDATCPTTTGSTLNEPSLNWSATTQDWTTVPLNPNLHVTVVGTATDIGEAGSLAKALSYYSAGVGKWVGTNDATSEALAKSLLTGIWTNYRDSIGISATETRTDYSNFNEAIYIPSGWTGTMPSGDPINSNSTFLSIRTPYESDSAYSKVETYLNGGAAPTFNYHRFWAQVDIASAYEVFANLFPGN

SEQ ID NO: 191 - DNA, 1035 bp, Unknown
  Obtained from environmental sample
ttggggctgtttctggccttttcgttgggcgcctgcgtgaagcgcgcggatccgcaggcggcggcgccggctgccgaggcgagctcggacgggaatcagtaccaggatccgagcgtcgatttcccgatcgtcgaggcgcccccggccggcaaggtgagcggtaatccgttcgcgggcctcaagctgtgggtcgatccagagtcgctggcgatgctccgctcgaacgcccttcgcgacaagcaacccgagcagtccaagacgctggacaagatcgccagccaaccgcaagcgctctggctcggcgactggaacagcaacatcttccgcaccgtccagcacgtggtgagcagggccaaggaccagggcgcggtgcccgtcttcattgcgtacaacgtgcccgggcgcgactgcggccagcactccgctggcggcatgaaggacgcggacagctacaagcgctggatccgccgcgtcgccgcgggcatcggcgaagacgcggccgtggtgatcctcgagccggacgcgatcccgctgctcgacaaggaaaattgcctcacgcccgcgcagcaggaggagcggctcgggctgctgctcgacgccgtgcgcgtgctgcgcaagaacccgcacacgatcgtctacatcgacggcggacacgccgcctggaagccgcccgagttcatcgccgaaaagctgcagaaggctggcctgggcgaggctcatggctttgcgctgaacacctcgaactacggcccgaccgatcagaacatcgagttcggcaagaaggtctcggcgctgacgggcggcgcccacttcgtgatcgacaccagccgtaacggcgccggctacgcgccgaacttcgagtggtgcaacccgcccggacgcaagatcggccctccaccctcgaccgaaacgggcgatccgctcgtggacgccttcctctggctcaagcgcccgggcgagtcggacggcgagtgcaacggcggaccgcgtgccggggtgttctggacggagcgcgcgctcgacctagctcgctag

SEQ ID NO: 192 - protein, 344 aa, Unknown
  Obtained from environmental sample
MGLFLAFSLGACVKRADPQAAAPAAEASSDGNQYQDPSVDFPIVEAPPAGKVSGNPFAGLKLWVDPESLAMLRSNALRDKQPEQSKTLDKIASQPQALWLGDWNSNIFRTVQHVVSRAKDQGAVPVFIAYNVPGRDCGQHSAGGMKDADSYKRWIRRVAAGIGEDAAVVILEPDAIPLLDKENCLTPAQQEERLGLLLDAVRVLRKNPHTIVYIDGGHAAWKPPEFIAEKLQKAGLGEAHGFALNTSNYGPTDQNIEFGKKVSALTGGAHFVIDTSRNGAGYAPNFEWCNPPGRKIGPPPSTETGDPLVDAFLWLKRPGESDGECNGGPRAGVFWTERALDLAR

SEQ ID NO: 193 - DNA, 2700 bp, Unknown
  Obtained from environmental sample
atgaatacgactgttcctccaaccgcgacgaatacaactgttcctccgaccgcgacgaatacatctgttcctccaacggcaacaaatacacctgttcctccaacttcaacacccgttaccccaactgcgacaaatacacctcccacacctatcactaccctaacatatacacctcaaccaacctggacaaatacacccgttcctccaactgcaacgaatacacccgttcctccaacttcaacacccattaccccaacctttactcctactacgcctagtaccggcggggcatgttcagttaaatttaccatgaactcatggggcagtggttttaccgctgatgtcatcattaccaacaatggctctgcggctattactggctggactttaaccttccccatcaatgcgcagatttctggcggctggaatgccaccgtcagccaatcaggggctaatgttacggcttcaaatcccgccagtcaatggaatggcacaattgccccgaatggtggcactgccgcttttggcttgcagggcaatgggactaatgttactgtgcctactgcttacaccttaaatggtgttgcttgtaatggtggcacagttgttcccacaaacactcctatcccaaccagtactcctattcctaccaaacctcctacatcaacccctactcctttggttacggcatgtccttgtgctacggctacttttacccccatcgccaccaatacccctgtggtcacgggaacagtaaccgctacacctacacccaataccgacctgtacaaacaacgtttcttagagttatggagtgacattcacaaaccctcgaatggctatttcagccctgaaggggtaccgtaccactcggtagaaaccttaatcattgaagctcctgaccatggtcacgaaagcaccagtgaagcctatagctactggatttggctcgaagccatgtatggaaatatgaccggcaattgggcgcccttgaatagtgcttggtcaaacatggaagccaacattattccgacccaagcgaaccaaccaaccaacagtttctataaccccaacagtcccgccagttatgcgggcgaacatgctctgcccgaaggctacccgtcattgttagaaacaggtgtacctgtgggtaaagacccaattgcgaatgaattgaaatccacatatggcacttcggatatttatgggatgcactggattatcgatgcggataactggtacggctatggtcaacggggcgataaagtgagccgtccgtcctacatcaacaccttccaacggggcgaacaagaatcagtgtgggaaaccgtgccgcacccgtcttgggagagcttcacctttggtaagacgaatagcggtttcttaccgttgtttatccaagatagcaactatgctcgccaatggcgatacaccaatgcgcccgatgcggatgctcgtgtcgtgcaagcgatgtactgggcgaaattgtgggcggatgcgcaaggtggctcaccgaccgtgaatgccttagttccgaaagcgacgaagatgggcgattacctgcggtatgcgatgtttgacaagtatttcaaaccgatgggttgccagagcaagaattgtgccggcgcgagtggttatgatagcgcacactacttaatgtcctggtactatgcttggggtggggccaccgactccagtgcagggtgggcgttccgtatcggctcaagtcacaaccactttgggtatcaaaacccgatggcggcgtgggctttgagcaaagtgcctgccttcaaaccggcttcgccgaatggtgccactgactggggcaagagtttacaacgccagttagagttctatcgctggttacaatccagcgaaggggccattgcgggtggcgcaaccaacagttggaatggtcgttatgatatgtaccctgcgggtgtcagcaccttctacaatatggcttacaccgatgcccccgtttatgctgaccccaagagcaacacatggttcggtttccaagcatggtcagtggaacgggtggcagaatattactacttaacgggtgaccccttagctgaacaaatcatggataaatggacggcctgggtgttaagcgaagtgaagtttgccaacggcacctatcaaatcccggtggacatcgattgggcgggtcaacctgatacatggaatgccgccaatcctggggcgaatgccaacttacacgtcattgtgaaaggatataaccaagatgtggggattgcggccagcttagccaagaccttgagctactacagcgcaggcaaaggcaaatacaccggtgttgtccatgcggcatccaaagataccgctaaacaattgttagacctgatgtggaccaactatcgggatagcaaagggatttctgtaacggaaacccgaggtgattacaaacggatgtttactcaaaccgtgtacattccttcctcctttactggggtgatggggaatggggaacagattaaacccggcgtgaaattccttgaccttcgctcgaaatatctctctgacccggcttatgcaggggtgaaagcgaagattgatgcgggtcaagacccctcattcaattaccaccgtttctgggcgcaagccgaaatcgctttagcttatgctgactactctcgcttattctcatcaaacattccacctgctactccctga

SEQ ID NO: 194 - protein, 899 aa, Unknown
  Obtained from environmental sample
MNTTVPPTATNTTVPPTATNTSVPPTATNTPVPPTSTPVTPTATNTPPTPITTLTYTPQPTWTNTPVPPTATNTPVPPTSTPITPTFTPTTPSTGGACSVKFTMNSWGSGFTADVIITNNGSAAITGWTLTFPINAQISGGWNATVSQSGANVTASNPASQWNGTIAPNGGTAAFGLQGNGTNVTVPTAYTLNGVACNGGTVVPTNTPIPTSTPIPTKPPTSTPTPLVTACPCATATFTPIATNTPVVTGTVTATPTPNTDLYKQRFLELWSDIHKPSNGYFSPEGVPYHSVETLIIEAPDHGHESTSEAYSYWIWLEAMYGNMTGNWAPLNSAWSNMEANIIPTQANQPTNSFYNPNSPASYAGEHALPEGYPSLLETGVPVGKDPIANELKSTYGTSDIYGMHWIIDADNWYGYGQRGDKVSRPSYINTFQRGEQESVWETVPHPSWESFTFGKTNSGFLPLFIQDSNYARQWRYTNAPDADARVVQAMYWAKLWADAQGGSPTVNALVPKATKMGDYLRYAMFDKYFKPMGCQSKNCAGASGYDSAHYLMSWYYAWGGATDSSAGWAFRIGSSHNHFGYQNPMAAWALSKVPAFKPASPNGATDWGKSLQRQLEFYRWLQSSEGAIAGGATNSWNGRYDMYPAGVSTFYNMAYTDAPVYADPKSNTWFGFQAWSVERVAEYYYLTGDPLAEQIMDKWTAWVLSEVKFANGTYQIPVDIDWAGQPDTWNAANPGANANLHVIVKGYNQDVGIAASLAKTLSYYSAGKGKYTGVVHAASKDTAKQLLDLMWTNYRDSKGISVTETRGDYKRMFTQTVYIPSSFTGVMGNGEQIKPGVKFLDLRSKYLSDPAYAGVKAKIDAGQDPSFNYHRFWAQAEIALAYADYSRLFSSNIPPATP

SEQ ID NO: 195 - DNA, 2916 bp, Unknown
  Obtained from environmental sample
atggatcccggacgcaaacgcataaccgctcggcgggcgttaaccgccacggcaaccgccctggccctgcccctgtcgatgctggccacgagtgcgacgaccgcgcgtgcagcgggcgttcagtgcagcgtggactacaagacgaacgactggggctccggcttcaccacggacgtcaccatcaccaaccgcggtacggacaccatcgacggctggacgctgacgtacgcctacaccggcaaccagaagctgatgaacggctggaacggcacctggtcccagtccggccagaacatcagcgtgaaggacgccggctacaacggcaagatcgccgcgggcgcgtccgcctccgccggcgcccagttcacctacagcggcaccaacgcggcgcccacgtccttctcggtcaacggcaccgtctgcaacggggcccaccagccgccgatcaccgtgctgaccagccccgccgcgggcgcggtctacacccagggcgaggcggtaccgctcgcggccacggccgccgccgcggacaacgcgacgatcagcaaggtggagttctacgacgacaccaaactgctgggcacggacacgacagcgccgtacgcgctctccgcctcaggcttgaccgtgggcagtcattcgctgctggcgaaggcgtacgacagcctgggcgcctccgcggagtccaccccggtcggcatcaccgtcgcctcaggcccgacggtggtcgccacgccctcccaactgggcgtccagcagggcaagacgggcacgtacgaggtgaagctgtcgaagcagccgagcgcgaacgtgacggtgacgacgactcgcgcgagcggcaactccggtctctcggtgaccggtggggcctcactcaccttcacgccctcgaactggagcaccgcccagaaggtgaccatcaccgccgactcctccggtaccggagcggcgaccttcgagtcggcggcccccgggcacgtgaaggcgtcggtcaccgtgacccagcttggagcgacgaaggagtacgacgctcggttcctggaggtgtacggcaagatcaccaacccggcgaacggctacttctcccccgagggcatcccctaccactcggtcgagacactgatcgtcgaggcgccggaccacggccacgagaccacgtcggaggcgtacagctacctcctgtggctgcaggccatgtacggcaaggtgacgggtgactggtccaagttcaacggtgcctgggacatcatggagaagtacatgatccccacgcacgccgaccagccgaccaactccttctacaacgcctccaagccggcgacctacgcgcccgagctggacaccccgaacgagtacccggcgaagctggacaagtcggtcgcgaccggttccgacccgatcgccggtgagctgaagagcgcgtacggcacggacgacatctacggcatgcactggctccaggacgtcgacaacgtctacggcttcggcaactcgccgggcaagtgcgaggccggaccttcggacaccggcccgtcgtacatcaacaccttccagcgcggcgtgcaggagtcggtgtgggagacggtgccgcagccgacgtgtgacgccttcaagttcggcggcaagaacgggtatctggacctgttcaccggtgactcctcctacgccaagcagtggaagttcaccaacgcacccgacgccgacgcgcgtgccgtgcaggccgcgtactgggccgacatctgggccaagcagcagggcaagggctccgacgtctccgtgacgatggacaaagccgccaagatgggcgactacctgcgctacgcgatgtacgacaagtacttcaagaagatcggcaactgtgtcggcccgaccgcctgcccggccggtaccggcaaggacgcctcgatgtacctgctgtcctggtactacgcctggggcggcgccaccgacacctcggcgggctgggcctggcgcatcggctccagccacacgcacggcggctaccagaaccctctcgcggcctacgcgctgagttcctacgccgacctgaagcccaagtcggccactggacaggcggactgggccaagtccctcggccggcagctggagttctaccgctggctgcagtccgacgagggtgccatcgcgggcggtgcgaccaacagctgggcgggccgctacgcccctcccccggccggcaagtcgaccttctacggcatgtactacgaccagcagcccgtctaccacgacccgccgtccaaccagtggttcggcttccaggcgtggtcgatggaacgggtggccgagctgtaccagcagacggggaacgcgcaggccaaggcggtcctcgacaagtgggtcaagtgggcgctgtccaagaccacggtcaacccggacggcacgtaccggatcccgtcgacccttcagtggtcgggacagcccgacacctggaacgcgtcgagtcccggcgccaacagcggacttcacgtcaccgtcgccgactacacgaacgacgtcggcgtggccgccgcgtacgccaagacgctgagctactacgccgccaagtcgggcgatacggcggcgaagacgacggccaaggcgctcctggacggcatgtggaacaactaccaggattcgctggggatcgcggtgccggagaaccgggcggactacaaccggtccggtgacagcgtctacgtccccagcagcttcagtggcgcgatgccgaacggggacacgatcaactcctcctcgaccttctcttcgctccggtccttctacaagagcgacccggcctggtcgaagatcgaggcctacttgaagggcggcgcggtgccgtcgttcacataccaccggttctgggcccaggcggacatcgccctggccatgggctcgtacgcggaactcctcgagtag

SEQ ID NO: 196 - protein, 971 aa, Unknown
  Obtained from environmental sample
MDPGRKRITARRALTATATALALPLSMLATSATTARAAGVQCSVDYKTNDWGSGFTTDVTITNRGTDTIDGWTLTYAYTGNQKLMNGWNGTWSQSGQNISVKDAGYNGKIAAGASASAGAQFTYSGTNAAPTSFSVNGTVCNGAHQPPITVLTSPAAGAVYTQGEAVPLAATAAAADNATISKVEFYDDTKLLGTDTTAPYALSASGLTVGSHSLLAKAYDSLGASAESTPVGITVASGPTVVATPSQLGVQQGKTGTYEVKLSKQPSANVTVTTTRASGNSGLSVTGGASLTFTPSNWSTAQKVTITADSSGTGAATFESAAPGHVKASVTVTQLGATKEYDARFLEVYGKITNPANGYFSPEGIPYHSVETLIVEAPDHGHETTSEAYSYLLWLQAMYGKVTGDWSKFNGAWDIMEKYMIPTHADQPTNSFYNASKPATYAPELDTPNEYPAKLDKSVATGSDPIAGELKSAYGTDDIYGMHWLQDVDNVYGFGNSPGKCEAGPSDTGPSYINTFQRGVQESVWETVPQPTCDAFKFGGKNGYLDLFTGDSSYAKQWKFTNAPDADARAVQAAYWADIWAKQQGKGSDVSVTMDKAAKMGDYLRYAMYDKYFKKIGNCVGPTACPAGTGKDASMYLLSWYYAWGGATDTSAGWAWRIGSSHTHGGYQNPLAAYALSSYADLKPKSATGQADWAKSLGRQLEFYRWLQSDEGAIAGGATNSWAGRYAPPPAGKSTFYGMYYDQQPVYHDPPSNQWFGFQAWSMERVAELYQQTGNAQAKAVLDKWVKWALSKTTVNPDGTYRIPSTLQWSGQPDTWNASSPGANSGLHVTVADYTNDVGVAAAYAKTLSYYAAKSGDTAAKTTAKALLDGMWNNYQDSLGIAVPENRADYNRSGDSVYVPSSFSGAMPNGDTINSSSTFSSLRSFYKSDPAWSKIEAYLKGGAVPSFTYHRFWAQADIALAMGSYAELLE

SEQ ID NO: 197 - DNA, 855 bp, Unknown
  Obtained from environmental sample
atgaagctcgtcgccctggtaaccgcagcggccctcgccggcccgttctacgccgacccggactcgaacgccacccgccaggcacgcaagtacgacaagcagggccggaccgaggccgcccggctcatgcggttgatagccgccgtcccgcaggcgttctggttcacgggcggcacgccgaagcaggtgcgcaagcaagtggaccgcaccgtcgacgcggcgaccgacgcgcaggcagtagcggtgctcgtcgcctacaacgtgcccggccgcgactgcggcggctactcggccggcggcgcccgccactacggccgctggatcgacggcttcgccgacggaatcggcaaccgcccggcggtggtaatcgtcgagccggacgcgctcgcctcgggctgccccaagctcaagcacatatggcgcgcggtgaagcggctacatcgcctgccgcaggcggcggtctacgtcgatgccggccattcccgctggcagcccgccaagaccatggcccgccgtctcgagaaggtcggcgcgcgtgccgccgccctcaacgtgtccaactttcgcgccaccgacgagctggtcgcctacggcaccgagatcggtctgcacttcgtcatcgacaccagccgcaacggccagggcccgaagggcacgcgctggtgcaacccgcccggccgcggccttggggcgctgcccaccgaccagaccggcatcccgctggtcgacgccttcctgtggatcaagaccccgggcgagtccgacggcgagtgtcggcacgcgcccaaggccggcgtgtggtggccgcggtacgcgctcgggctcgccaagcgcgccaatccgccgctgccgtag

SEQ ID NO: 198 - protein, 284 aa, Unknown
  Obtained from environmental sample
  SIGNAL (1)...(18)
  DOMAIN (18)...(270): Glycosyl hydrolases family 6
MKLVALVTAAALAGPFYADPDSNATRQARKYDKQGRTEAARLMRLIAAVPQAFWFTGGTPKQVRKQVDRTVDAATDAQAVAVLVAYNVPGRDCGGYSAGGARHYGRWIDGFADGIGNRPAVVIVEPDALASGCPKLKHIWRAVKRLHRLPQAAVYVDAGHSRWQPAKTMARRLEKVGARAAALNVSNFRATDELVAYGTEIGLHFVIDTSRNGQGPKGTRWCNPPGRGLGALPTDQTGIPLVDAFLWIKTPGESDGECRHAPKAGVWWPRYALGLAKRANPPLP

SEQ ID NO: 199 - DNA, 855 bp, Unknown
  Obtained from environmental sample
atgaagctcgtcgccctggcaaccgcagcggccctcgccggcccgttctacgccgacccggactcgaacgccgcccgccaggcgcgcaagtacgacaagcagggccggcccgaggccgcgcggctcatgcgatcgatggccgccgtcccgcaggcgttctggttcacggggggcacgccgaggcaggtgcgcaagcaggtggaccgcaccgtcgacgcggcgaccgacgcgcaggcagtagcggtgctcgtcgcctacaacgtgcccggccgcgactgcggcggctactcggccggcggcgcccgccactacggccgctggatcgacggcttcgccgacggcaccggcaaccgcccggcggtggtgatcgtcgagccggacgcgctcgcctcgggctgccccaagctcaagcacatatggcgcgcggtgaagcggctacatcgcctgccgcaggcggcggtctacgtcgatgccggccattcccgctggcagcccgccaagaccatggcccgccgtctcgagaaggtcggcgcgcgtgccgccgccctcaacgtgtccaactttcgcgccaccgacgagctggtcgcctacggcaccgagatcggtctgcacttcgtcatcgacaccagccgcaacggccagggcccgaagggcacgcgctggtgcaacccgcccggccgcggcctgggggcgctgcccaccgaccagaccggcatcccgctggtcgacgccttcctgtggatcaagaccccgggcgagtccgacggcgagtgtcggcacgcgcccaaggccggcgtgtggtggccgcggtacgcgctcgggctcgccaagcgcgccaatccgccgctgccgtag

SEQ ID NO: 200 - protein, 284 aa, Unknown
  Obtained from environmental sample
  DOMAIN (18)...(270): Glycosyl hydrolases family 6
MKLVALATAAALAGPFYADPDSNAARQARKYDKQGRPEAARLMRSMAAVPQAFWFTGGTPRQVRKQVDRTVDAATDAQAVAVLVAYNVPGRDCGGYSAGGARHYGRWIDGFADGTGNRPAVVIVEPDALASGCPKLKHIWRAVKRLHRLPQAAVYVDAGHSRWQPAKTMARRLEKVGARAAALNVSNFRATDELVAYGTEIGLHFVIDTSRNGQGPKGTRWCNPPGRGLGALPTDQTGIPLVDAFLWIKTPGESDGECRHAPKAGVWWPRYALGLAKRANPPLP

SEQ ID NO: 201 - DNA, 1461 bp, Unknown
  Obtained from environmental sample
atgatcgtgcgaatgcttgccctgaccggaagcgtcgcggcggtaggctgcagcggcgaggttccgtccgagccaaacggagagaacgaccttgcccaggtgcaagaaacgctgacgctgcaggcaaatagcaagttcttcgtgccgccgccgaattctggcgcggtcaagcaggtggcgagcctgctgaagaagggcaagcttgcggatgcggcgcgcatcgcggcgatggtcacgacgccgcaggcggtttggttcaccgacggcgcccccaaagacgtgaagaaggcggtcaagtcgacgaccacgctggcccaagctgccaagcgcacgccgatcctggtcgcgtacaacctgccgtaccgcgactgtgcgcagtattccgccggcggtgcggtggacacggccgcttacgaggcatggattgacggctttgccgaaggcatcggcacgcgtgatgcgatcgtcatcctcgaacccgatgggctcggcatcatcccgtacaacgtcacgttctggaacacacccgagtggtgccaacccaaagtgaccgacgacgacgggaacctagtccccgcgcccggtgcgagcgcggaagagcgttacgctcagctccgctacgcggtggccgcgctggccgagaaagcccccaacgcctcgatctatctggacgcgacgcacagccattggctgggcgtgggtgaggctgcctatcgcctgtacaaggccggtttcgatggctcggtgccgcaggtgaaagggttttacctcaacgcctcgaactaccagaccacggaaaactcgatccagttcggcacttgggtctcgatgtgtttggccaccggcatgggcgatttcccggattggtacgtcgaacagaacccgaactcccccaactacgggtcgccccagttcggctggtgcgcggggcagtaccgcgaaaccgaaccgggctctgaggttttcgtcgtcgactactccgaagactacgccgcaggggtcaccgaaggcctgcagggcttgatgtccgacgttggcgccagcgcagcggaaatgcccttcgtgatcgacacgagccgcaacggccaaggtgcgctcgacgccgcaagttacgcggcagctccgtacaaccaacccgaggcagtcatcagcgccttgaattcgggcaactggtgcaatccgcggggcgcgggcctcggcctcaggccgagcgcgaacacgggcaacccgctggtcgacgcctacttgtgggtgaaggttccgggcgaatcggacggcagctgcgattccgcaggcggcgcccgcgcttgggacttctcgctgtacaacccatggggtgtttccgcatcgaaccaagctcacttcgatccgctctggggcatggtcgatccggcggctggcgactggttccccgagcaagcgctcgagcttgccaagaaagccagtccgcccctgttctga

SEQ ID NO: 202 - protein, 486 aa, Unknown
  Obtained from environmental sample
MIVRMLALTGSVAAVGCSGEVPSEPNGENDLAQVQETLTLQANSKFFVPPPNSGAVKQVASLLKKGKLADAARIAAMVTTPQAVWFTDGAPKDVKKAVKSTTTLAQAAKRTPILVAYNLPYRDCAQYSAGGAVDTAAYEAWIDGFAEGIGTRDAIVILEPDGLGIIPYNVTFWNTPEWCQPKVTDDDGNLVPAPGASAEERYAQLRYAVAALAEKAPNASIYLDATHSHWLGVGEAAYRLYKAGFDGSVPQVKGFYLNASNYQTTENSIQFGTWVSMCLATGMGDFPDWYVEQNPNSPNYGSPQFGWCAGQYRETEPGSEVFVVDYSEDYAAGVTEGLQGLMSDVGASAAEMPFVIDTSRNGQGALDAASYAAAPYNQPEAVISALNSGNWCNPRGAGLGLRPSANTGNPLVDAYLWVKVPGESDGSCDSAGGARAWDFSLYNPWGVSASNQAHFDPLWGMVDPAAGDWFPEQALELAKKASPPLF

SEQ ID NO: 203 - DNA, 1461 bp, Unknown
  Obtained from environmental sample
atgatcgtgcgaatgcttgccctgaccggaagcgtcgcggcggtaggctgcagcggcgaggttccgtccgagccaaacggagagaacgaccttgcccaggtgcaagaaacgctgacgctgcaggcaaatagcaagttcttcgtgccgccgccgaattctggcgcggtcaagcaggtggcgagcctgctgaagaagggcaagcttgcggatgcggcgcgcatcgcggcgatggtcacgacgccgcaggcggtttggttcaccgacggcgcccccaaagacgtgaagaaggcggtcaagtcgacgaccacgctggcccaagctgccaagcgcacgccgatcctggtcgcgtacaacctgccgtaccgcgactgtgcgcagtattccgccggcggtgcggtggacacggccgcttacgaggcatggattgacggctttgccgaaggcatcggcacgcgtgatgcgatcgtcatcctcgaacccgatgggctcggcatcatcccgtacaacgtcacgttctggaacacacccgagtggtgccaacccaaagtgaccgacgacgacgggaacctagtccccgcgcccggtgcgagcgcggaagagcgttacgctcagctccgctacgcggtggccgcgctggccgagaaagcccccaacgcctcgatctatctggacgcgacgcacagccattggctgggcgtgggtgaggctgcctatcgcctgtacaaggccggtttcgatggctcggtgccgcaggtgaaagggttttacctcaacgcctcgaactaccagaccacggaaaactcgatccagttcggcacttgggtctcgatgtgtttggccaccggcatgggcgatttcccggattggtacgtcgaacagaacccgaactcccccaactacgggtcgccccagttcggctggtgcgcggggcagtaccgcgaaaccgaaccgggctctgaggttttcgtcgtcgactactccgaagactacgccgcaggggtcaccgaaggcctgcagggcttgatgtccgacgttggcgccagcgcagcggaaatgcccttcgtgatcgacacgagccgcaacggcaaaggtgcgctcgacgccgcaagttacgcggcagctccgtacaaccaacccgaggcagtcatcagcgccttgaattcgggcaactggtgcaatccgcggggcgcgggcctcggcctcaggccgagcgcgaacacgggcaacccgctggtcgacgcctacttgtgggtgaaggttccgggcgaatcggacggcagctgcgattccgcaggcggcgcccgcgcttgggacttctcgctgtacaacccatggggtgtttccgcatcgaaccaagctcacttcgatccgctctggggcatggtcgatccggcggctggcgactggttccccgagcaagcgctcgagcttgccaagaaagccagtccgcccctgttctga

SEQ ID NO: 204 - protein, 486 aa, Unknown
  Obtained from environmental sample
MIVRMLALTGSVAAVGCSGEVPSEPNGENDLAQVQETLTLQANSKFFVPPPNSGAVKQVASLLKKGKLADAARIAAMVTTPQAVWFTDGAPKDVKKAVKSTTTLAQAAKRTPILVAYNLPYRDCAQYSAGGAVDTAAYEAWIDGFAEGIGTRDAIVILEPDGLGIIPYNVTFWNTPEWCQPKVTDDDGNLVPAPGASAEERYAQLRYAVAALAEKAPNASIYLDATHSHWLGVGEAAYRLYKAGFDGSVPQVKGFYLNASNYQTTENSIQFGTWVSMCLATGMGDFPDWYVEQNPNSPNYGSPQFGWCAGQYRETEPGSEVFVVDYSEDYAAGVTEGLQGLMSDVGASAAEMPFVIDTSRNGKGALDAASYAAAPYNQPEAVISALNSGNWCNPRGAGLGLRPSANTGNPLVDAYLWVKVPGESDGSCDSAGGARAWDFSLYNPWGVSASNQAHFDPLWGMVDPAAGDWFPEQALELAKKASPPLF

SEQ ID NO: 205 - DNA, 1746 bp, Unknown
  Obtained from environmental sample
ttgtatagttataatatagcaaatattattttctacattacctcaatgaaaccatttttcacacttatttttatggcaacacttgtaaatgcgcaaactcatggattcggggcgaggataaaccaaattggctatggagaacaggctaaaaaaattttggttttgaaagatgcaggagtcacctctgttgaattcaaggatttggcaaacggtaaaacggtattgaatgtaccattatctgctccagcaacttgggaatatagtggagagtctgtgcgtaaggcagatttttctgggattgcaaaaaaaggagtttatgccgcttatgtaaatggagccagagtttctgacaatataattgtgcaaaacaatgtttatgaaaatgtgttcaaagccgctttgaaatggttttattatcaaagagctagcactgccttaccatttgaatttgctggcaaatggatgcgagcagccggacatctagataccagcgttagcttttatccagaagccgaaaaatcagcaggctggaaaatcagcagtccaaagggctggtatgatgcaggcgattatggcaaatacgttgtgaatagcggtatttctgttttcacgcttttggaactctatgagcattttgaaaaagaactcaaagcagtttccttgaacattcccgaaagcaaaagcaaaacaccggatattttagaagaagtacgctggaacctagactggatgctaaccatgcaagacccagaagacggcggggtttaccacaaattgaccacagcaagattcagtgggcacgaattgccagaaggcgaccttgcaaaaagatatgtggttatgaaaacaagcacagccgccttgaactttgccgctgttatggcacaggcaagccgcgtttacaaaccctttgatgcaaaattttcagcaacagccattgccgccgcagaaaaagcttttgaatgggcaacaaaaaatccggcaattctattcaaacaaccagagggtatgaacacagggcaatacgctcctagcgatgaaacagtccaagacgaaaaactatgggcagcagcagaactctacataagcacaaagaaaaaatcttatgcagatttaattgatatcgttccctttgacggtgccgcaccttggtggggaaatgtgaattttttggctgtgtacagaatttccgatgcaaaaaacggatttaaaaaagatttgagcaaaaaagctcaagacactcttatatcggctgcaaatgcgctcaaagatatagcagaaaattccgcttatggcataccagtaaataaatggaattttgtttggggttcaaattctgctgttgcaaataatggcattttgcttttgcacgcatactatttaacaaaaaacaaaagctatttagatgccgctcaaagagccttggattatcttttgggagcaaaccccattgatataagctatgtaactggacacggcaacagaaccccaatgtccccgcaccacagaccatccgaaggagatggcatcacagagccagtgccgggaatgctggttggcggaccgcacgagggtgggcaagatgttaaaccaaacgggcgttgcgaaaactatgtgcaaaaaggcaaacccgctctctcctatttagaccacgattgcagctatgccaccaatgaagttgccataaactggaacagccccttagtttacctttctggtgcattgcactttttgaatgtaaaatga

SEQ ID NO: 206 - protein, 581 aa, Unknown
  Obtained from environmental sample
  SIGNAL (1)...(31)
MYSYNIANIIFYITSMKPFFTLIFMATLVNAQTHGFGARINQIGYGEQAKKILVLKDAGVTSVEFKDLANGKTVLNVPLSAPATWEYSGESVRKADFSGIAKKGVYAAYVNGARVSDNIIVQNNVYENVFKAALKWFYYQRASTALPFEFAGKWMRAAGHLDTSVSFYPEAEKSAGWKISSPKGWYDAGDYGKYVVNSGISVFTLLELYEHFEKELKAVSLNIPESKSKTPDILEEVRWNLDWMLTMQDPEDGGVYHKLTTARFSGHELPEGDLAKRYVVMKTSTAALNFAAVMAQASRVYKPFDAKFSATAIAAAEKAFEWATKNPAILFKQPEGMNTGQYAPSDETVQDEKLWAAAELYISTKKKSYADLIDIVPFDGAAPWWGNVNFLAVYRISDAKNGFKKDLSKKAQDTLISAANALKDIAENSAYGIPVNKWNFVWGSNSAVANNGILLLHAYYLTKNKSYLDAAQRALDYLLGANPIDISYVTGHGNRTPMSPHHRPSEGDGITEPVPGMLVGGPHEGGQDVKPNGRCENYVQKGKPALSYLDHDCSYATNEVAINWNSPLVYLSGALHFLNVK

SEQ ID NO: 207 - DNA, 2028 bp, Unknown
  Obtained from environmental sample
atgataaagagacgcaccgtattgggagcgctcccagcgttcggtctgatcggcatgcaggcgtccaccgccgccgccgctacacccgccgccactccggcgatcgccgggacagcatccgacgtcaaggccgcttcggtggaccggtttctcgcgctctacgaaaagatcaaggacccggcgtccggctacttctcccagcacgacccgccggtgccctaccactcggtggagacgctgatggtcgaggcacccgactacgggcacgtgaccacgtccgaggcgttcagcttctggatctggctcgaggcccagtacggcagggtcaccggcgagtgggcgccgttcaacgaggcgtgggcgtcgatggagcggcacatcatcccggacgcgaaccaccagcgcgggaactccgcctacaacccggccgacccggccacctacgcgccggaacacgacacgccgcaggaatacccggcccggctcgacacctcgatcgcggtcggccgcgacccgatcgccgacgagctgagcagcacctacggcaccgacgacgtgtacggcatgcactggctgctcgacgtggacaaccggtacggctacggcgaccagggcgacggcacgtccagcccgtcctacgtgaacacgttccagcgcgggccggaggagtcgacctgggagaccgtgccgcatccgtcgcacgagtcgttcaacgacggcgggcccaacggtttcctcgatctgttcgtcggtgaccagagttatgccaggcagtggcgctacaccaacgccccggacgccgacgcgcgggccgtgcaggcggcgtactgggcgctgatctgggcgcgtgagcagggcaacgagtcgcaggtctcggcgaccgtggcgaaggccgcgaagctgggcgactacctgcgctattccatgtacgacaagtacttcaagcggatcggcgactgcgtcggcccgtcgtcgtgccagccgggcaacggcaaggacagcgcgcactacctgttgtcctggtactacgcgtggggcggcggcgcggacggagcgtgggcctggcggatcgggtcgagcccagcgcatttcggctaccagaacccgatggccgcgcacgttttgtccactgtggacggactagtgccgagatcgccgaccgcgcaagcggactgggccaccagcctgagcaggcagctggagttctaccgctggctgcagtccgccgagggcggcatcgcaggcggcgcgacgaacagctggaaaggccgctacgagcagccaccggcaggcacgccggcgttctacgggatggcctacgactggcagccggtgtatcacgatccgccgagcaaccggtggttcggcatgcaggcctggtcgatggagcgggtcgccgagctgtatcacgtcaccggcaacgccgacgcgggcgcgttgctacaacgctgggtgccgtgggcgatggcgaacacgactgtcgacccggcgaacggaacctgggccatcccgtccgacctgtcctggtccgggcagccggacgactgggaaccggcgaaccccggcgctaacgcgggcctgcacgtcacggtcagcacgaccggccaggacctcggggtgaccgccgcactgacccgcacgctgatgcactacgcggcggcgtccggcgacaccgcggcacgggacatggcgggcgcgctgctcgacgcgatgtgggccaacgccgacgacatcggcatttcggtcgaggaaacccgcaccgactacagccggttcgacgacgccgtgcacattccctccggctggaccgggaccatgcccaacggggacccgatccaatccggagcgacgttcacctcgatccggtcctggtatctcgacgacccggactacccgcaggtcgcggcgtatctgaacgggtcgggcccggccccggtgttccgctaccaccggttctgggcacaggccgacatcgcgatggccatggcggacttcggcctgctgttcccccagaggtcgcgcgagtag

SEQ ID NO: 208 - protein, 675 aa, Unknown
  Obtained from environmental sample
MIKRRTVLGALPAFGLIGMQASTAAAATPAATPAIAGTASDVKAASVDRFLALYEKIKDPASGYFSQHDPPVPYHSVETLMVEAPDYGHVTTSEAFSFWIWLEAQYGRVTGEWAPFNEAWASMERHIIPDANHQRGNSAYNPADPATYAPEHDTPQEYPARLDTSIAVGRDPIADELSSTYGTDDVYGMHWLLDVDNRYGYGDQGDGTSSPSYVNTFQRGPEESTWETVPHPSHESFNDGGPNGFLDLFVGDQSYARQWRYTNAPDADARAVQAAYWALIWAREQGNESQVSATVAKAAKLGDYLRYSMYDKYFKRIGDCVGPSSCQPGNGKDSAHYLLSWYYAWGGGADGAWAWRIGSSPAHFGYQNPMAAHVLSTVDGLVPRSPTAQADWATSLSRQLEFYRWLQSAEGGIAGGATNSWKGRYEQPPAGTPAFYGMAYDWQPVYHDPPSNRWFGMQAWSMERVAELYHVTGNADAGALLQRWVPWAMANTTVDPANGTWAIPSDLSWSGQPDDWEPANPGANAGLHVTVSTTGQDLGVTAALTRTLMHYAAASGDTAARDMAGALLDAMWANADDIGISVEETRTDYSRFDDAVHIPSGWTGTMPNGDPIQSGATFTSIRSWYLDDPDYPQVAAYLNGSGPAPVFRYHRFWAQADIAMAMADFGLLFPQRSRE

SEQ ID NO: 209 - DNA, 1287 bp, Unknown
  Obtained from environmental sample
atgaccagtcatcgccagtccgcacgccttgccgttttcactgtccttctcctccttctaatggccgcgcccgcgttcgtgatggccggcccgacaggtttggagttggggcctgatacggagttttacgtcgtcccgcccaatcagggggccagaaaacagattaaccaactggaaaagaaaggcaaattcgccgatgccaacttgattcgcgacatgatccgcaccccgcaagctgcctggttcacgcagggcacgcccgcgtcggtcaagaaggaagtccgggatgtggtcaaagccgccgcccgcgataacgccgttccagttctagtcgcctataacctgccgttccgcgactgcgcccagttctcggccggtggggccaccaccgtccaggaatacaaggattggatcaaggctttcgcggccgggatcggcgccaacgaggccattgtcattctggaaccggatgggctgggcatcatcccctggtacaagcagttccgcgggctgccggccgaatccggcagctacgaatggtgtcagccggccgaggccgacgaagccaccgcggccaatgaccgcttcgacatgctcaactatgccgtcaacgtgctgaaggccaagccaaatgtccgggtgtaccttgacggcacacatagctcctggctgggggccggcgacgccgcgcaccggctatcgcaggccggtcttgccaacgccgacggcttctacctgaacgtctccaattaccgcctgacggaacatttggaaaagtatggcacgtggattgccaagtgctattggttcgccaccgatcctggctcctggggcttggggcacttcgactggtgtgccagccaatattacccggccaatcccaatgacttctcgacctggcatctgaccgaccaatggtacgccgacaacgtagagagccagacctggtttccttatccgggcgacgccggactgaagacgttcgtcattgataccagccgcaacggtcaggggccgtggacgccgccggccggctatcccgacccgcaggactggtgcaatccgccgggccggggcctcggcctcacacccacggccgacaccggcaacgcattgatcgacgcctacctgtggatcaaaatccctggtgaatcggacggcgaatgcacgcgcggtctggggccgggcggcacgacggccgatccggagtggggcgtcattgaccccggcgccggacagtggttcccgcaaatggcgctggaactggcgcggaatgccaacccttag

SEQ ID NO: 210 - protein, 428 aa, Unknown
  Obtained from environmental sample
MTSHRQSARLAVFTVLLLLLMAAPAFVMAGPTGLELGPDTEFYVVPPNQGARKQINQLEKKGKFADANLIRDMIRTPQAAWFTQGTPASVKKEVRDVVKAAARDNAVPVLVAYNLPFRDCAQFSAGGATTVQEYKDWIKAFAAGIGANEAIVILEPDGLGIIPWYKQFRGLPAESGSYEWCQPAEADEATAANDRFDMLNYAVNVLKAKPNVRVYLDGTHSSWLGAGDAAHRLSQAGLANADGFYLNVSNYRLTEHLEKYGTWIAKCYWFATDPGSWGLGHFDWCASQYYPANPNDFSTWHLTDQWYADNVESQTWFPYPGDAGLKTFVIDTSRNGQGPWTPPAGYPDPQDWCNPPGRGLGLTPTADTGNALIDAYLWIKIPGESDGECTRGLGPGGTTADPEWGVIDPGAGQWFPQMALELARNANP

SEQ ID NO: 211 - DNA, 1674 bp, Unknown
  Obtained from environmental sample
atggtaacacttgtaaacgcacaaactcatggattcggggcaaaaataaaccaaattggctatggagaacaagctaaaaaaatcttggttttaaaagacgcaggaactgcttctgttgaatttaaagatttggcaagcggcaaaacagtattaaatgcaccattatctgctccggcaacttgggaatatagcggagagtcggtgcgtaaggcagatttttctggtattgtgaaaaaaggagtttatgccgcttatgtaaacggagcaagaatttccgacaatataattgtgcaaaacgacgtttatgaaaatgtattcaaagcttctttgaaatggttttactatcaaagggcaagcacggttctattgcccgaatttgctggcaaatgggcacgagcggctgggcactcagacactagcgttggcttttacccagaaaccgaaaagcccgcaggttggaaaatcagcagtcccaagggttggtacgatgcaggcgactatggcaaatacgttgtgaacagcgggatttctgttttcactcttttggaactctatgagcattttgaaaaagaactcaaaaaagtttctttgaacattcccgaaagcaaaagcaaaacgccagatattttagaagaagtgcgctggaacctagactggatgctaaccatgcaagacccagaagatggcggggtttaccacaaattgaccaccgcaagattcagcgggcacgaactgccagaagctgatattgcaaaaagatatgttgttatgaaaacaagcacagccgccttgaactttgccgctgttatggcacaggcaagccgcgtttacaaaccctttgatgcaaaattttccgcgaaagtcattgccgccgcagaaaaagcctttgaatgggcaacaaaaaatccgtcaattctattcaaacaaccagagggtatgaacacagggcaatacgcccctggcgatgaaacaatccaagacgaaaaactatgggcagcagcagaactctacatcagcacaaagaaaaaagattatgagaatataattgatatagttccctttgacggtgccgcaccttggtggggcaatgtgaattttttggctgtgtatagaatttccgatgccaaaaacggatttaaaaaagatttgagcaaaaaagctcaagacacccttatatcggcggcaaatacgctcaaagatatagcagaaaattccgcttatggcataccagtaaataaatggaattttgtttggggttcaaattctgccgttgcaaataatggaattttgcttttgcacgcctattatttaacaaagaacaaaagctatttagatgccgctcaaagagctttggattatcttttgggagcaaaccccatggatataagttatgtgaccggacacggcaacagaacgccaatgtctccgcaccacaggccatctgagggagatggtatcacagagccagtacccggaatgctagttggcggaccgcacgagggtgggcaagatgttaaaccaaatgggcgttgcgaaagctatgtgcaaaaaggcaaacccgccctctcctatttagaccacgactgcagctatgcaaccaatgaagttgccataaattggaacagcccattagtttatctttccggtgcgttgcactttttgaatgcaaaatga

SEQ ID NO: 212 - protein, 557 aa, Unknown
  Obtained from environmental sample
  DOMAIN (6)...(93): N-terminal ig-like domain of cellulase
MVTLVNAQTHGFGAKINQIGYGEQAKKILVLKDAGTASVEFKDLASGKTVLNAPLSAPATWEYSGESVRKADFSGIVKKGVYAAYVNGARISDNIIVQNDVYENVFKASLKWFYYQRASTVLLPEFAGKWARAAGHSDTSVGFYPETEKPAGWKISSPKGWYDAGDYGKYVVNSGISVFTLLELYEHFEKELKKVSLNIPESKSKTPDILEEVRWNLDWMLTMQDPEDGGVYHKLTTARFSGHELPEADIAKRYVVMKTSTAALNFAAVMAQASRVYKPFDAKFSAKVIAAAEKAFEWATKNPSILFKQPEGMNTGQYAPGDETIQDEKLWAAAELYISTKKKDYENIIDIVPFDGAAPWWGNVNFLAVYRISDAKNGFKKDLSKKAQDTLISAANTLKDIAENSAYGIPVNKWNFVWGSNSAVANNGILLLHAYYLTKNKSYLDAAQRALDYLLGANPMDISYVTGHGNRTPMSPHHRPSEGDGITEPVPGMLVGGPHEGGQDVKPNGRCESYVQKGKPALSYLDHDCSYATNEVAINWNSPLVYLSGALHFLNAK

SEQ ID NO: 213 - DNA, 1587 bp, Unknown
  Obtained from environmental sample
gtggatactgccaagagtggaacagcaacagtgacagtaagctccggcggcggttcacagactttcaatgacatcacagccgcgcaattagtcgctgatataaaaatcggctggaatctgggcaactcacttgacgctactaacggttttggcgcaaacgcctcggttgaccaaatggaaagaggatgggataaccccgctacgacaaaggcaaatattaccgcgattaagaacgccggctttaacgccatcagaattcccgtgtcctggacaaaggccgccaacggggcgccgaattacaccattcgcgccgactggatggcgagggttaaggaaattgtcaattacgccgttgacaacgatatgtatatcattttgaacacccaccatgacgaggacgtgcttacattcaagaattcaaacgcggcggcgggtaaggcggcgttccagaaactctgggagcagattgccgatgccttcaaggattacaacgaaaagttgatctttgagggattgaacgaaccaagaacccccggcagttccaatgaatggaacggcggcactgacgaagaacgcgctaacctgaattcctattaccccatttttgttaatacggtaagaagctcaggcggtaataacggtaagcgcatattgatgataaacccctatgccgcttccatggaagcagtcgcaatgaacgcgttaacgctcccgacagacagcgtggcaaataaacttattgtttctttccactcttatcagccttataattttgccctgaataaagactccccaataaatacgtggagcagcggcaattccggggatacttcgccaattaccggcccgattgaccgctattataccaaatttgtcaatcagggcattcccgtaataatcggcgaattcggcgccatgaataaaaacaatgaagccgtcagggcgcaatgggccgaatattatgttagttacgcgaagagtaaaggcatcaaatgtttttggtgggataacggcgttacaagcggcagcggggaattgtttggcctgcttaacaggcagaacaatacttttacatataccgctttacttaacggtatgatgagcggggcaggcggaactgttccaaccccgccaaccccgccggatacgccacccccgccaactaccattaccggaaatttgggtaactaccaatttggaacacaggaagacggcgtttctcccaactatacacaggctgtatgggtactgtcatcagctaacgtagcaacagcaaaaacagcgggggcaaaactgacgctggtattaacaacagccccaagcgctgtaatgcagtttgtatggcaaggaccggccaataatctctggtggaatgaaaaagaaattcttggcaataccggtaatccaagcgcaacgggtgtaacatggaattcaggcacaaaaacccttacaatccctctgaccgctaactctgttaaagattacagcgtctttaccgtccagccatcattgaggatcatcattgcctattacaatggcggagatgttaatgatcttggcatagtcagcgcaaatttgacacaatga

SEQ ID NO: 214 - protein, 528 aa, Unknown
  Obtained from environmental sample
MDTAKSGTATVTVSSGGGSQTFNDITAAQLVADIKIGWNLGNSLDATNGFGANASVDQMERGWDNPATTKANITAIKNAGFNAIRIPVSWTKAANGAPNYTIRADWMARVKEIVNYAVDNDMYIILNTHHDEDVLTFKNSNAAAGKAAFQKLWEQIADAFKDYNEKLIFEGLNEPRTPGSSNEWNGGTDEERANLNSYYPIFVNTVRSSGGNNGKRILMINPYAASMEAVAMNALTLPTDSVANKLIVSFHSYQPYNFALNKDSPINTWSSGNSGDTSPITGPIDRYYTKFVNQGIPVIIGEFGAMNKNNEAVRAQWAEYYVSYAKSKGIKCFWWDNGVTSGSGELFGLLNRQNNTFTYTALLNGMMSGAGGTVPTPPTPPDTPPPPTTITGNLGNYQFGTQEDGVSPNYTQAVWVLSSANVATAKTAGAKLTLVLTTAPSAVMQFVWQGPANNLWWNEKEILGNTGNPSATGVTWNSGTKTLTIPLTANSVKDYSVFTVQPSLRIIIAYYNGGDVNDLGIVSANLTQ

SEQ ID NO: 215 - DNA, 1053 bp, Unknown
  Obtained from environmental sample
gtgtcagggagagccatgcctccccgtcccgcctggttcgcggccgccctgctcgccgtcgcgtgcatcattccccccgccccggcgaccatcccggccaccggggtcgtgggccagccacgcgcgtcgatgaagtcggcgcgcgtgaagggggagagcccgttcaaggacgcctacttcgtgctcgagcccgagtcgaatgcgcggcgcacggccgacaagtggcgggacagtcgtcccgcggacgccgccgccatggacaagatcgcgggtcagccggccgcagcctggatcgggaactggagcaaccccgtcgacgtcgaggtgaagcggcaggtgtgggcaaagacgggcgccggcggcctccccgtcatgatcatctacaacctgccgtaccgggattgtggctcgtactcggcgggcggggcggggtcgcccgagcggtaccggcaatggatccgcaaggtggcgtccgggatcggttcacggcgcgcggtgctggtgctggagcccgatggcctgcccatgctggcgaagtgtctggacgcccgccgccagcaagagcgcatcgacatgatccacttcgccgtcgacacgctgatggagctgccgggcgccgccgtctacctggacgcgggacactcgaagtgggtgtcgcccgaggagatggcgccgcgcttgaaagcggccggcatcgagcgcgccgatggcttctcgctgaacgtggcgaactaccaggccacgccggacctgctggcatatggccgccgcctgtcggcgttgctggggggcaagcacttcatcgtcgacaccagccgcaacgggaacggcgcgcccgagggcttcggccccgacgacgaacgcagctggtgcaaccccgacggccgcgcgctgggcacgccgcccaccacgaacaccggcgagcccctgtgcgacgccttcctgtggttgaagccgcccggcgaatcggacggcgcctgcaacaagggtcccatcgccggcgcgttctggcctcagaaggcgctggagatggcccgcaacgcgcactggtga

SEQ ID NO: 216 - protein, 350 aa, Unknown
  Obtained from environmental sample
MSGRAMPPRPAWFAAALLAVACIIPPAPATIPATGVVGQPRASMKSARVKGESPFKDAYFVLEPESNARRTADKWRDSRPADAAAMDKIAGQPAAAWIGNWSNPVDVEVKRQVWAKTGAGGLPVMIIYNLPYRDCGSYSAGGAGSPERYRQWIRKVASGIGSRRAVLVLEPDGLPMLAKCLDARRQQERIDMIHFAVDTLMELPGAAVYLDAGHSKWVSPEEMAPRLKAAGIERADGFSLNVANYQATPDLLAYGRRLSALLGGKHFIVDTSRNGNGAPEGFGPDDERSWCNPDGRALGTPPTTNTGEPLCDAFLWLKPPGESDGACNKGPIAGAFWPQKALEMARNAHW

SEQ ID NO: 217 - DNA, 1104 bp, Unknown
  Obtained from environmental sample
atgaccctcaagcacgcctcttccctgatccgtggactctctctctggcgtggcgcgctcggcgtgctcgccgtttcgctgtcgctcgccgcctgcggtggcggcgcacagacgggtgccccgcccacgaccggccccgccagcaccgcgctcgccccgacgaacgagagcggcccgcccgacgacatgcccatcgtcgaggcgccgaagccgcccaaggctaccggcaacccgctgaaggggatgaagctctggatcgatcccgagacgaacgcggccctccgcgccaacgcgctcgaaaagacccagcccgagattgccaagctctttcgcgagaagatcgcgaagtactcgcaggcgctctggctcggcgagtggaacagcaacgtctaccgcaaggtgaagtggacggtggatcaggcctcctcgacgggcgaggttccgaccttcatcctgtacaacgttcccggtcgtgactgcggccagcactcggcgggcggtctgaagaccaaagagtcgtaccagcgctgggtgcgcaagatcgcggcgggcgtcggcgatcgcgcggccatcatggtgctcgagcccgacgcgctcggcttgctcgagaaggaaaactgcatgaccaaggagcagcaggccgagcgcgtgttcctgctgcacgacgcgatcaaggtgctgcgccagaacccgaagaccatcgtctacctcgacggcggccactcgcgctggcacccggtcgaagagcacgcccgcctgctcaagatgggcggcgtggaagacgcgcacggcttcgcgctcaacacttcgaactaccgcgcgatggatgagctcttgccgttcggcaagaagctcagcgagctcctcggcggcgctcactacatcatcgacaccagccgcaacggtgcgggcccgctcggcgtcgaatggtgcaaccccccgggccgcaagctcggcctgccgccgacgctcgacaccgcggatcccgagcacatcgacgcttacctgtggctcaagcgtccgggcgaatctgacggttcgtgcaacggcgccccggtcgccggcgcgttctgggacaagcaggcgatcgaactcgcgcagtga

SEQ ID NO: 218 - protein, 367 aa, Unknown
  Obtained from environmental sample
MTLKHASSLIRGLSLWRGALGVLAVSLSLAACGGGAQTGAPPTTGPASTALAPTNESGPPDDMPIVEAPKPPKATGNPLKGMKLWIDPETNAALRANALEKTQPEIAKLFREKIAKYSQALWLGEWNSNVYRKVKWTVDQASSTGEVPTFILYNVPGRDCGQHSAGGLKTKESYQRWVRKIAAGVGDRAAIMVLEPDALGLLEKENCMTKEQQAERVFLLHDAIKVLRQNPKTIVYLDGGHSRWHPVEEHARLLKMGGVEDAHGFALNTSNYRAMDELLPFGKKLSELLGGAHYIIDTSRNGAGPLGVEWCNPPGRKLGLPPTLDTADPEHIDAYLWLKRPGESDGSCNGAPVAGAFWDKQAIELAQ

SEQ ID NO: 219 - DNA, 1104 bp, Unknown
  Obtained from environmental sample
atgaccctcaagcacgcctcttccctgatccgtggactctctctctggcgtggcgcgctcggcgtgctcgccgtttcgctgtcgctcgccgcctgcggtggcggcgcacagacgggtgccccgcccacgaccggccccgccagcaccgcgctcgccccgacgaacgagagcggcccgcccgacgacatgcccatcgtcgaggcgccgaagccgcccaaggctaccggcaacccgctgaaggggatgaagctctggatcgatcccgagacgaacgcggccctccgcgccaacgcgctcgaaaagacccagcccgagatcgccaagctcttccgcgagaagatcgcgaaatactcgcaagctctctggctcggcgagtggaacagcaacgtctaccgcaaggtgaagtggaccgtcgaccaagcctccgcgacgggcgaagttccgaccttcatcctctacaacgtgcccggccgcgactgtggccagcactcggcgggcggtctgaagaccaaagagtcgtaccagcgctgggtgcgcaagatcgcggcgggcgtcggcgatcgcgcggccatcatggtgctcgagcccgacgcgctcggcttgctcgagaaggaaaactgcatgaccaaggagcagcaggccgagcgcgtgttcctgctgcacgacgcgatcaaggtgctgcgccagaacccgaagaccatcgtctacctcgacggcggccactcgcgctggcacccggtcgaagagcacgcccgcctgctcaagatgggcggcgtggaagacgcgcacggcttcgcgctcaacacttcgaactaccgcgcgatggatgagctcttgccgttcggcaagaagctcagcgagctcctcggcggcgctcactacatcatcgacaccagccgcaacggtgcgggcccgctcggcgtcgaatggtgcaaccccccgggccgcaagctcggcctgccgccgacgctcgacaccgcggatcccgagcacatcgacgcttacctgtggctcaagcgtccgggcgaatctgacggttcgtgcaacggcgccccggtcgccggtgcgttctgggacaagcaggcgatcgaactcgcgcagtga

SEQ ID NO: 220 - protein, 367 aa, Unknown
  Obtained from environmental sample
MTLKHASSLIRGLSLWRGALGVLAVSLSLAACGGGAQTGAPPTTGPASTALAPTNESGPPDDMPIVEAPKPPKATGNPLKGMKLWIDPETNAALRANALEKTQPEIAKLFREKIAKYSQALWLGEWNSNVYRKVKWTVDQASATGEVPTFILYNVPGRDCGQHSAGGLKTKESYQRWVRKIAAGVGDRAAIMVLEPDALGLLEKENCMTKEQQAERVFLLHDAIKVLRQNPKTIVYLDGGHSRWHPVEEHARLLKMGGVEDAHGFALNTSNYRAMDELLPFGKKLSELLGGAHYIIDTSRNGAGPLGVEWCNPPGRKLGLPPTLDTADPEHIDAYLWLKRPGESDGSCNGAPVAGAFWDKQAIELAQ

SEQ ID NO: 221 - DNA, 1710 bp, Unknown
  Obtained from environmental sample
atgagtcgcaccagaacgtcgcttgtcgcagcactggcactggtcgccggaacctcggggactgtgctcctctcggcaccggcaggtgccgccaccgcctcggtcccctgcaccgtggactacaaggtgcagaatcagtggaacaccggcttcaccgccgccgtcacgatcaccaacaacgctgccgccaaatccggttggtcgctgaagtggtcgtacgccggcaaccagcagatcaccagcggctggagcgcgaagatcacccagagcggtgccgctgtcaccgccaccaacgagacctacaacagcgctctggggaccggcggttcggtcagcttcggcttcaacggctcctacagcggcgccaacgccgtgcccgcgaccttcacgctcgacggtgttacctgcaacgtcgacgacggcggcaccggcgggggaggcgggggcgggaccgacggccgtgtcgccaacccctatgtcggggccaaggcgtatgtgaaccccgcgtggtcggccctggccgccgccgagccgggcggcagccggatcgccaaccagtccaccgccgtctggctggaccggatcgccgcgatcaacggcgtgaacggcggcatgggcctgcgcgcccacctggacgaggcactgaagcagaagggttctggcgacctggtcgtgcagttcgtcatctacgacctgcccggccgcgactgctccgccctcgcctccaacggcgaactcggcccgaacgacctcgacaagtacaagtcccagtacatcgacccgatcgcctcgatcttctccgacccgaagtacgcgggcctgcggatcgccaccgtcatcgagcccgactcactgcccaacctggtcaccaacggcggtggcaccgacaccaccaccgacgcctgcgtgaccatgaagagcaacggcaactacgagaagggcgtctcctacgccctggacacgctcggcgccatcccgaacgtctacaactacatcgacgccggccaccacggctggctcggctgggacaccaacctcggcccgtccgtgcaggagttcgccaaggtcgccacgtccaacggcgcgagcgtgaacgacgtggccgggttcatcgtcaacaccgccaactacggcgccgccaaggagccgaacttcaaggtcaccgacagcgtcaacggtcagaccgtccggcagtcgaagtgggtggactggaaccagtacgtggacgagcagtcgttcgcgctcggactgcgggacaagttggtcgcggccgggttcgactccggcctcggcatgctgatcgacacctcccgcaacggctggggcggctccgcgcgacccaccggccccggcccgatgacctccgtcgacgactacgtcaacggcagccgcgtcgaccggcgcatccacaccggcaactggtgcaaccagagcggcgccgggctcggtgagcggcccaccgcggccccggccgccggcatcgacgcctacgtgtgggtcaagcctccgggcgagtccgacggctccagctccgccgtctccaacgacgagggcaagggcttcgaccgcatgtgcgaccccacctacggcggcaacccccgcaacggcaacagccccaccggcgccctgccgaacgcgccgctggccggacactggttctccgcccagttccagcagctcatgcagaacgcctacccgccactgccgtaa

SEQ ID NO: 222 - protein, 569 aa, Unknown
  Obtained from environmental sample
  SIGNAL (1)...(30)
MSRTRTSLVAALALVAGTSGTVLLSAPAGAATASVPCTVDYKVQNQWNTGFTAAVTITNNAAAKSGWSLKWSYAGNQQITSGWSAKITQSGAAVTATNETYNSALGTGGSVSFGFNGSYSGANAVPATFTLDGVTCNVDDGGTGGGGGGGTDGRVANPYVGAKAYVNPAWSALAAAEPGGSRIANQSTAVWLDRIAAINGVNGGMGLRAHLDEALKQKGSGDLVVQFVIYDLPGRDCSALASNGELGPNDLDKYKSQYIDPIASIFSDPKYAGLRIATVIEPDSLPNLVTNGGGTDTTTDACVTMKSNGNYEKGVSYALDTLGAIPNVYNYIDAGHHGWLGWDTNLGPSVQEFAKVATSNGASVNDVAGFIVNTANYGAAKEPNFKVTDSVNGQTVRQSKWVDWNQYVDEQSFALGLRDKLVAAGFDSGLGMLIDTSRNGWGGSARPTGPGPMTSVDDYVNGSRVDRRIHTGNWCNQSGAGLGERPTAAPAAGIDAYVWVKPPGESDGSSSAVSNDEGKGFDRMCDPTYGGNPRNGNSPTGALPNAPLAGHWFSAQFQQLMQNAYPPLP

SEQ ID NO: 223 - DNA, 1710 bp, Unknown
  Obtained from environmental sample
atgagtcgcaccagaacgtcgcttgtcgcagcactggcactggtcgccggaacctcggggactgtgctcctctcggcaccggcaggtgccgccaccgcctcggtcccctgcaccgtggactacaaggtgcagaatcagtgggacaccggcttcaccgccgccgtcacgatcaccaacaacgctgccgccaaatccggttggtcgctgaagtggtcgtacgccggcaaccagcagatcaccagcggctggagcgcgaagatcacccagagcggtgccgctgtcaccgccaccaacgagacctacaacagcgctctggggaccggcggttcggtcagcttcggcttcaacggctcctacagcggcgccaacgccgtgcccgcgaccttcacgctcgacggtgttacctgcaacgtcgacgacggcggcaccggcgggggaggcgggggcgggaccgacggccgtgtcgccaacccctatgtcggggccaaggcgtatgtgaaccccgcgtggtcggccctggccgccgccgagccgggcggcagccggatcgccaaccagtccaccgccgtctggctggaccggatcgccgcgatcaacggcgtgaacggcggcatgggcctgcgcgcccacctggacgaggcactgaagcagaagggttctggcgacctggtcgtgcagttcgtcatctacgacctgcccggccgcgactgctccgccctcgcctccaacggcgaactcggcccgaacgacctcgacaagtacaagtcccagtacatcgacccgatcgcctcgatcttctccgacccgaagtacgcgggcctgcggatcgccaccgtcatcgagcccgactcactgcccaacctggtcaccaacggcggtggcaccgacaccaccaccgacgcctgcgtgaccatgaagagcaacggcaactacgagaagggcgtctcctacgccctggacacgctcggcgccatcccgaacgtctacaactacatcgacgccggccaccacggctggctcggctgggacaccaacctcggcccgtccgtgcaggagttcgccaaggtcgccacgtccaacggcgcgagcgtgaacgacgtggccgggttcatcgtcaacaccgccaactacggcgccgccaaggagccgaacttcaaggtcaccgacagcgtcaacggtcagaccgtccggcagtcgaagtgggtggactggaaccagtacgtggacgagcagtcgttcgcgctcggactgcgggacaagttggtcgcggccgggttcgactccggcctcggcatgctgatcgacacctcccgcaacggctggggcggctccgcgcgacccaccggccccggcccgatgacctccgtcgacgactacgtcaacggcagccgcgtcgaccggcgcatccacaccggcaactggtgcaaccagagcggcgccgggctcggtgagcggcccaccgcggccccggccgccggcatcgacgcctacgtgtgggtcaagcctccgggcgagtccgacggctccagctccgccgtctccaacgacgagggcaagggcttcgaccgcatgtgcgaccccacctacggcggcaacccccgcaacggcaacagccccaccggcgccctgccgaacgcgccgctggccggacactggttctccgcccagttccagcagctcatgcagaacgcctacccgccactgccgtaa

SEQ ID NO: 224 - protein, 569 aa, Unknown
  Obtained from environmental sample
MSRTRTSLVAALALVAGTSGTVLLSAPAGAATASVPCTVDYKVQNQWDTGFTAAVTITNNAAAKSGWSLKWSYAGNQQITSGWSAKITQSGAAVTATNETYNSALGTGGSVSFGFNGSYSGANAVPATFTLDGVTCNVDDGGTGGGGGGGTDGRVANPYVGAKAYVNPAWSALAAAEPGGSRIANQSTAVWLDRIAAINGVNGGMGLRAHLDEALKQKGSGDLVVQFVIYDLPGRDCSALASNGELGPNDLDKYKSQYIDPIASIFSDPKYAGLRIATVIEPDSLPNLVTNGGGTDTTTDACVTMKSNGNYEKGVSYALDTLGAIPNVYNYIDAGHHGWLGWDTNLGPSVQEFAKVATSNGASVNDVAGFIVNTANYGAAKEPNFKVTDSVNGQTVRQSKWVDWNQYVDEQSFALGLRDKLVAAGFDSGLGMLIDTSRNGWGGSARPTGPGPMTSVDDYVNGSRVDRRIHTGNWCNQSGAGLGERPTAAPAAGIDAYVWVKPPGESDGSSSAVSNDEGKGFDRMCDPTYGGNPRNGNSPTGALPNAPLAGHWFSAQFQQLMQNAYPPLP

SEQ ID NO: 225 - DNA, 1725 bp, Unknown
  Obtained from environmental sample
ttgctcgcagccctcgcgctgctcggcgggacctcagcggccgcgctagtctcggcgccggccggagccgccgccgcggccgcatcctgcacggtggactacaaggtgaaccagtgggacaccggcttcaccaccgccgtcacggtcaccaacaacggcccggccaagtccagttgggcgctgaagtggtcgtacgccggtaaccagaggatcagcaatggctggaacgcgcggataagccagagcggttcgtccgtcatggccgccaacgagagctacaacggcacgctcgccaccgggggttcggcgagcttcggtttccaggcgtcctacagcggcagcaacgacatcccggccacgttcaccctcgacggcgtgacctgcaacgtcgacggcggcgggcccaccgaccccgggccgaccgatccgggacccacggatccggggccgaccgaccccggcccgggtgggcccaagctcgccaacccctacgtcggtgccaaggcctacgtgaacccggagtggtccgcgaaggcggccgccgaaccgggcggcagccgcatctccaaccagcccaccgccgtgtggctcgaccggatcgccgccatcaacggcgtgaacggcggcatgggcctgcgggcccacctggacgaggcgctgaagcagaagggcagcggcgaactggtcgtgcagctggtcatctacgacctgcccggccgtgactgcgccgccctcgcctccaacggcgaactgggaccgaacgacctcgacaagtacaagagccagtacatcgacccgatcacctcgatcctgtccgagtcgaagtacgcgggcctgcggatcgccaccgtcatcgagcccgactcgctgcccaacctggtcaccaacgccgggggcaccaacaccaccaccgacgcctgcgtgaccatgaagggcaacggcaactacgagaagggtgtctcctacgcgctcgacaagctcggcgccctcgccaacgtctacaactacatcgacgccggacaccacggctggctgggctgggacagcaacctcggcccctcggtccaggagttctacaaggtcgccacgaccaacggcgcgagcgtgagcgatgtggccggcttcatcgtcaacaccgccaactacagccccgtcaaggaacccaacttcaaggtcaccgacatggtcaacggccagaccatccgccaggcgaagtgggtcgactggaaccagtacgtggacgagcagtcgttcgcgctcgggctgcgggacaagctggtcgccgccgggttcgactccggtctcggcatgctgatcgacacctcccgcaatggctggggcggctccgcccggcccaccggtcccggcgcgacgacctccgtcgacgactacgtcaacggcggccgcatcgaccggcgcctgcacgccggcaactggtgcaaccagagcggcgccggaatcggccagcggcccaccgtggcccccgccaccggcgtcgacgcctatgtgtgggtcaagccgccgggggagtccgacggcaacagcgccgccgtgcccaatgacgagggcaagggcttcgaccgcatgtgcgacccgacctacggcgggaacgcccgcaacggcaacaaccccaccggggcactggcgaacgcaccgctcgccgggcactggttctccgcccagttccagcaactgatgcagaacgcctacccgccactgccgtaa

SEQ ID NO: 226 - protein, 574 aa, Unknown
  Obtained from environmental sample
MLAALALLGGTSAAALVSAPAGAAAAAASCTVDYKVNQWDTGFTTAVTVTNNGPAKSSWALKWSYAGNQRISNGWNARISQSGSSVMAANESYNGTLATGGSASFGFQASYSGSNDIPATFTLDGVTCNVDGGGPTDPGPTDPGPTDPGPTDPGPGGPKLANPYVGAKAYVNPEWSAKAAAEPGGSRISNQPTAVWLDRIAAINGVNGGMGLRAHLDEALKQKGSGELVVQLVIYDLPGRDCAALASNGELGPNDLDKYKSQYIDPITSILSESKYAGLRIATVIEPDSLPNLVTNAGGTNTTTDACVTMKGNGNYEKGVSYALDKLGALANVYNYIDAGHHGWLGWDSNLGPSVQEFYKVATTNGASVSDVAGFIVNTANYSPVKEPNFKVTDMVNGQTIRQAKWVDWNQYVDEQSFALGLRDKLVAAGFDSGLGMLIDTSRNGWGGSARPTGPGATTSVDDYVNGGRIDRRLHAGNWCNQSGAGIGQRPTVAPATGVDAYVWVKPPGESDGNSAAVPNDEGKGFDRMCDPTYGGNARNGNNPTGALANAPLAGHWFSAQFQQLMQNAYPPLP

SEQ ID NO: 227 - DNA, 1740 bp, Unknown
  Obtained from environmental sample
atgagtcgcaccaaaacctcattgctcgcagccctcgcgctgctcggcgggacctcagcggccgcgctagtctcggcgccggccggagccgccgccgcggccgcaccctgcacggtggactacaaggtgaaccagtgggacaccggcttcaccaccgccgtcacggtcaccaacaacggcccggccaagtccagttgggcgctgaagtggtcgtacgccggtaaccagaggatcagcaatggctggaacgcgcggataagccagagcggttcgtccgtcacggccgccaacgagagctacaacggcacgctcgccaccgggggttcggcgagcttcggtttccaggcgtcctacagcggcagcaacgacatcccggccacgttcaccctcgacggcgtgacctgcaacgtcgacggcggcgggcccaccgaccccgggccgaccgatccgggacccacggatccggggccgaccgaccccggcccgggtgggcccaagctcgccaacccctacgtcggcgccaaggcctacgtgaacccggagtggtccgcgaaggcggccgccgaaccgagcggcagccgcatctccaaccagcccaccgccgtgtggctcgaccggatcgccgccatcaacggcgtgaacggcggcatgggcctgcgggcccacctggacgaggcgctgaagcagaagggcagcggcgaactggtcgtgcagctggtcatctacgacctgcccggccgtgactgcgccgccctcgcctccaacggcgaactgggaccgaacgacctcgacaagtacaagagccagcacatcgacccgatcacctcgatcctgtccgagtcgaagtacgcgggcctgcggatcgccaccgtcatcgagcccgactccctgcccaacctggtcaccaacgccgggggcaccaacaccaccaccgacgcctgcgtgaccatgaagggcaacggcaactacgagaagggtgtctcctacgcgctcgacaagctcggcgccctcgccaacgtctacaactacatcgacgccggacaccacggctggctgggctgggacagcaacctcggcccgtcggtccaggagttctacaaggtcgccacgaccaacggcgcgagcgtgagcgatgtggccggcttcatcgtcaacaccgccaactacagccccgtcaaggaacccaacttcaaggtcaccgacatggtcaacggccagaccatccgccaggcgaagtgggtcgactggaaccagtacgtggacgagcagtcgttcgcgctcgggctgcgggacaagctggtcgccgccgggttcgactccggtctcggcatgctgatcggcacctcccgcaacggctggggcggctccgcccggcccaccggtcccggcgcgacgacctccgtcgacgactacgtcaacggcggccgcatcgaccggcgcctgcacgccggcaactggtgcaaccagagcggcgccggaatcggccagcgacccaccgtggcccccgccgccggcgtcgacgcctatgtgtgggtcaagccgccgggggagtccgacggcaacagcgccgccgtgcccaatgacgagggcaagggcttcgaccgcatgtgcgacccgacctacggcggcaacgcccgcaacggcaacaaccccaccggggcactggcgaacgcaccgctcgccgggcactggttctccgcccagttccagcaactgatgcagaacgcctacccgccactg

SEQ ID NO: 228 - protein, 580 aa, Unknown
  Obtained from environmental sample
MSRTKTSLLAALALLGGTSAAALVSAPAGAAAAAAPCTVDYKVNQWDTGFTTAVTVTNNGPAKSSWALKWSYAGNQRISNGWNARISQSGSSVTAANESYNGTLATGGSASFGFQASYSGSNDIPATFTLDGVTCNVDGGGPTDPGPTDPGPTDPGPTDPGPGGPKLANPYVGAKAYVNPEWSAKAAAEPSGSRISNQPTAVWLDRIAAINGVNGGMGLRAHLDEALKQKGSGELVVQLVIYDLPGRDCAALASNGELGPNDLDKYKSQHIDPITSILSESKYAGLRIATVIEPDSLPNLVTNAGGTNTTTDACVTMKGNGNYEKGVSYALDKLGALANVYNYIDAGHHGWLGWDSNLGPSVQEFYKVATTNGASVSDVAGFIVNTANYSPVKEPNFKVTDMVNGQTIRQAKWVDWNQYVDEQSFALGLRDKLVAAGFDSGLGMLIGTSRNGWGGSARPTGPGATTSVDDYVNGGRIDRRLHAGNWCNQSGAGIGQRPTVAPAAGVDAYVWVKPPGESDGNSAAVPNDEGKGFDRMCDPTYGGNARNGNNPTGALANAPLAGHWFSAQFQQLMQNAYPPL

SEQ ID NO: 229 - DNA, 1740 bp, Unknown
  Obtained from environmental sample
atgagtcgcaccaaaacctcattgctcgcagccctcgcgctgctcggcgggacctcagcggccgcgctagtctcggcgccggccggagccgccgccgcggccgcatcctgcacggtggactacaaggtgaaccagtgggacaccggcttcaccaccgccgtcacggtcaccaacaacggcccggccaagtccagttgggcgctgaagtggtcgtacgccggtaaccagaggatcagcaatggctggaacgcgcggataagccagagcggttcgtccgtcatggccgccaacgagagctacaacggcacgctcgccaccgggggttcggcgagcttcggtttccaggcgtcctacagcggcagcaacgacatcccggccacgttcaccctcgacggcgtgacctgcaacgtcgacggcggcgggcccaccgaccccgggccgaccgatccgggacccacggatccggggccgaccgaccccggcccgggtgggcccaagctcgccaacccctacgtcggtgccaaggcctacgtgaacccggagtggtccgcgaaggcggccgccgaaccgggcggcagccgcatctccaaccagcccaccgccgtgtggctcgaccggatcgccgccatcaacggcgtgaacggcggcatgggcctgcgggcccacctggacgaggcgctgaagcagaagggcagcggcgaactggtcgtgcagctggtcatctacgacctgcccggccgtgactgcgccgccctcgcctccaacggcgaactgggaccgaacgacctcgacaagtacaagagccagtacatcgacccgatcacctcgatcctgtccgagtcgaagtacgcgggcctgcggatcgccaccgtcatcgagcccgactcgctgcccaacctggtcaccaacgccgggggcaccaacaccaccaccgacgcctgcgtgaccatgaagggcaacggcaactacgagaagggtgtctcctacgcgctcgacaagctcggcgccctcgccaacgtctacaactacatcgacgccggacaccacggctggctgggctgggacagcaacctcggcccctcggtccaggagttctacaaggtcgccacgaccaacggcgcgagcgtgagcgatgtggccggcttcatcgtcaacaccgccaactacagccccgtcaaggaacccaacttcaaggtcaccgacatggtcaacggccagaccatccgccaggcgaagtgggtcgactggaaccagtacgtggacgagcagtcgttcgcgctcgggctgcgggacaggctggtcgccgccgggttcgactccggtctcggcatgctgatcgacacctcccgcaatggctggggcggctccgcccggcccaccggtcccggcgcgacgacctccgtcgacgactacgtcaacggcggccgcatcgaccggcgcctgcacgccggcaactggtgcaaccagagcggcgccggaatcggccagcggcccaccgtggcccccgccaccggcgtcgacgcctatgtgtgggtcaagccgccgggggagtccgacggcaacagcgccgccgtgcccaatgacgagggcaagggcttcgaccgcatgtgcgacccgacctacggcgggaacgcccgcaacggcaacaaccccaccggggcactggcgaacgcaccgctcgccgggcactggttctccgcccagttccagcaactgatgcagaacgcctacccgccactg

SEQ ID NO: 230 - protein, 580 aa, Unknown
  Obtained from environmental sample
MSRTKTSLLAALALLGGTSAAALVSAPAGAAAAAASCTVDYKVNQWDTGFTTAVTVTNNGPAKSSWALKWSYAGNQRISNGWNARISQSGSSVMAANESYNGTLATGGSASFGFQASYSGSNDIPATFTLDGVTCNVDGGGPTDPGPTDPGPTDPGPTDPGPGGPKLANPYVGAKAYVNPEWSAKAAAEPGGSRISNQPTAVWLDRIAAINGVNGGMGLRAHLDEALKQKGSGELVVQLVIYDLPGRDCAALASNGELGPNDLDKYKSQYIDPITSILSESKYAGLRIATVIEPDSLPNLVTNAGGTNTTTDACVTMKGNGNYEKGVSYALDKLGALANVYNYIDAGHHGWLGWDSNLGPSVQEFYKVATTNGASVSDVAGFIVNTANYSPVKEPNFKVTDMVNGQTIRQAKWVDWNQYVDEQSFALGLRDRLVAAGFDSGLGMLIDTSRNGWGGSARPTGPGATTSVDDYVNGGRIDRRLHAGNWCNQSGAGIGQRPTVAPATGVDAYVWVKPPGESDGNSAAVPNDEGKGFDRMCDPTYGGNARNGNNPTGALANAPLAGHWFSAQFQQLMQNAYPPL

SEQ ID NO: 231 - DNA, 2010 bp, Unknown
  Obtained from environmental sample
gtggaatacaaattttttgctttagtcgcagtttctgcgtctgttttggcgtcatcggcctttgccgctaacgcttacattaaccaggtgggtttccgcccttccgatcccaaggaattttcgcttgtcggagcctctggcaatgtcgaaattcaggatgcctctggcaagactgtgcttacggtaacgcctggcgccgcctcgttctgggatgcaagcggccagaatgtacagctggtcgatatctccaaattgaccgccgagggcaagtacagcattaaggtgggcggccagacacttcgccaagatctggtggtcaagaacaatacctttgccgacgtttacaaggcggctatcaagtggttctattaccagcgcgcctctatggctctcgaaagtgcatacgcgggcaagtgggctcgtgctgcaggccatacgaatgcgactgtcgaacttcataattctacgggcgcttcgggctctatcaattcgagcaagggctggtacgatgccggcgactacggacgctatatcgtaaattcgggcattaccacctacacgctcctttcgctttacgaacatttcccggaatttttcaagacggccaagtggaatattcctgccgatggaactttgccggatttgctcgccgaaatcaagtacaatttggactggatgcttactatgcaggccaatgacggtagcgtttatcacaagcttacctctcttgctttcccgggcgatgtgatgcctgcgcaagacaatgcaaaactttatgttatcggtaagagtgccgaagccgcacttgactttgccggtgtgatggcagttgctgcgcgcgtgtacaagccgtttgattccaattacgccgccaagtgccttgatgcagccaagaaggcttatagttggggctcttcgaatatgagctaccactttaccgcaaacccctccgatgtggcgacgggtgcgtacgaaggcaacaacgcggccgacgaaaaactttttgccggcacggaacttgccattaccacgggtgataattcttacaagcagaatggttcttcggaatatgtgtcgtactggggcgacctttcgggcgttgccacttatggcaaggcgacgcatgcatctgtgtttggcgatgcaaacgaagccaaacagaaaatcttgggcactgcagatggtttcgtgaaccgcaccaagtcgggctttggcgtggtgatggcgaaagatgactttgtgtggggctcgaatgctgtggccgcgaatcagggcgtgtggcttttgcatgcctactacttgaccggcgaagagaagtattatactgccgcgctcaaagtgcttgactacttgcttggcaagaatccgcttgacatgtcatttgtaacgggttacggcaccaagtctccgaaattaccgcaccaccgcccgagtacttcggataacatagaagatccgattccgggtatgcttgtgggtggcccgcagcccggcggcgaagacgttggctctgctgccgaatggaagtgcgccgattacagaacgggcaatgcggcgacagcttatactgaccaacgttgcagctatgcaaccaacgaagtggctatcaactggaatgctcctttcgcttaccttgccggtgcccttgaagctttgaacgccggttatgcaccctcgtttgcagtagatggcgtcgccagaaagtctaccgtcatttcgtcaagttcttcggtcgcttcatctagttctcaggaggcctcaagctcctctgtcgttccggaatccagttcatctgaacagaactccagctcttcggaagcgctcgcttcgagttcttcgcagtggaatccgtgggtttcgagcagttctgtggcgactacggcaattcacgaagttctgcctgccagcgtgcagaataaggctgccccgcgcctccgccagaatggtcataagctctatgtcgaaaagaatggcaagcgctttgaccttctcggcaacagcatccgctaa

SEQ ID NO: 232 - protein, 669 aa, Unknown
  Obtained from environmental sample
  SIGNAL (1)...(22)
  DOMAIN (15)...(109): N-terminal ig-like domain of cellulase
MEYKFFALVAVSASVLASSAFAANAYINQVGFRPSDPKEFSLVGASGNVEIQDASGKTVLTVTPGAASFWDASGQNVQLVDISKLTAEGKYSIKVGGQTLRQDLVVKNNTFADVYKAAIKWFYYQRASMALESAYAGKWARAAGHTNATVELHNSTGASGSINSSKGWYDAGDYGRYIVNSGITTYTLLSLYEHFPEFFKTAKWNIPADGTLPDLLAEIKYNLDWMLTMQANDGSVYHKLTSLAFPGDVMPAQDNAKLYVIGKSAEAALDFAGVMAVAARVYKPFDSNYAAKCLDAAKKAYSWGSSNMSYHFTANPSDVATGAYEGNNAADEKLFAGTELAITTGDNSYKQNGSSEYVSYWGDLSGVATYGKATHASVFGDANEAKQKILGTADGFVNRTKSGFGVVMAKDDFVWGSNAVAANQGVWLLHAYYLTGEEKYYTAALKVLDYLLGKNPLDMSFVTGYGTKSPKLPHHRPSTSDNIEDPIPGMLVGGPQPGGEDVGSAAEWKCADYRTGNAATAYTDQRCSYATNEVAINWNAPFAYLAGALEALNAGYAPSFAVDGVARKSTVISSSSSVASSSSQEASSSSVVPESSSSEQNSSSSEALASSSSQWNPWVSSSSVATTAIHEVLPASVQNKAAPRLRQNGHKLYVEKNGKRFDLLGNSIR

SEQ ID NO: 233 - DNA, 1251 bp, Unknown
  Obtained from environmental sample
atgaagaaattgatattatgcttgttgttccctatgctgttggcattttgccattcggcttccgtttcgcaggggaaagaggcagttgatctttcatataagcctaaaatttccgatacgaaaaatgattttactcctgaaccgatgtctgataagacagccttcgattattttcgtgatgaagggctgcttgtcggttggaatgtcgggaatagtttggatgcttatgtcagcggacgggcaagcgaaaccagttggggaaacccaaaaataaatcaggcgctgtttaacggggttaaacaggcgggttttaatttggtgcgcattcctgtaacatggatgggctacatcggtcctgagccggattatcatattaatgaaagttatattgagcgcgttgctgaagtggttgcaatggcccatagggcaggtctcaaggcgattatcaatctgcaccacgacggctcaaccgtaaaaggaagggacaacggctggctttccgttaacaaagcccgtacaagcgaggaaggttataaagaagtaacatttaaatttgtacgcgtgtggaagcagatagcggagtattttaagaattacggcgattggctaatttttgaatcaatgaacgagattcatgacggtaactggggctggggcagtgatagcgtgcagagtacgcagtatgatattgtaaacgaatggaaccgtctttttacgaaagttgtaagaagcacaggttccaataacgccacccgtttcctggttcttcccggttattgtacggtagccagacatactgtcgccaattatttttggctgccgcctgacagcgtccctaacaaacagattgttacctttcattattatgagccaagtgaatttgccatagaaggaaaacgtgcctcatggggaacaagtagcgaaaaacaaaaagtagaaaatgattttgccccctttaagggaaaatatattgataataatattccggtaattatcggagaaacaggcgcggcattgcaactgcatccgggcgacaaagcgcttgaagatcaggcgcgtcaaagcagaataaattacattacgcacatatttgttactgcgaaaaaatacgggcttgttccaatttattgggacaatggggctataaggggtaatggggaaaaatacggtctttttgaccgaacgacgggtcaggccaattcggcggacagttctgttcttatcgatattatgattaaaagcgtaaaataa

SEQ ID NO: 234 - protein, 416 aa, Unknown
  Obtained from environmental sample
MKKLILCLLFPMLLAFCHSASVSQGKEAVDLSYKPKISDTKNDFTPEPMSDKTAFDYFRDEGLLVGWNVGNSLDAYVSGRASETSWGNPKINQALFNGVKQAGFNLVRIPVTWMGYIGPEPDYHINESYIERVAEVVAMAHRAGLKAIINLHHDGSTVKGRDNGWLSVNKARTSEEGYKEVTFKFVRVWKQIAEYFKNYGDWLIFESMNEIHDGNWGWGSDSVQSTQYDIVNEWNRLFTKVVRSTGSNNATRFLVLPGYCTVARHTVANYFWLPPDSVPNKQIVTFHYYEPSEFAIEGKRASWGTSSEKQKVENDFAPFKGKYIDNNIPVIIGETGAALQLHPGDKALEDQARQSRINYITHIFVTAKKYGLVPIYWDNGAIRGNGEKYGLFDRTTGQANSADSSVLIDIMIKSVK

SEQ ID NO: 235 - DNA, 1101 bp, Unknown
  Obtained from environmental sample
atgaccctcaagcacgcctcttccctgatccgtggactctcactttggcgtggtgcgctcggcgtgctcgccgtctcgctgtcgctcgccgcctgcggtggcgcacagacgggggccccgcccacgaccggccccgccagcaccgcgctcgccccgtcgaacgagagcggcccgcccgacgacatgcccattgtcgaggcgccgaagccgcccaaggctaccggcaacccgctgaaggggatgaagctctggatcgatcccgagacgaacgcggccctccgcgccaacgcgctcgaaaagacccagcccgagatcgccaagctcttccgcgagaagatcgcgaaatactcgcaagctctctggctcggcgagtggaacagcaacgtctaccgcaaggtgaagtggaccgtcgaccaagcctccgcgacgggcgaagttccgaccttcatcctctacaacgtcccgggtcgcgactgtggccagcactcggcgggcggtctgaagaccaaagagtcgtaccagcgctgggtgcgcaagatcgcggcaggcgtcggcgatcgcgcggccatcatggtgctcgagcccgacgcgctcggtttgctcgagaaggaaaactgcatgaccaaggagcagcaggccgagcgcgtgttcctgctgcacgacgcgatcaaggtgctgcgccagaacccgaagaccatcgtctacctcgacggcggccactcgcgctggcacccggtcgaagagcacgcccgcctgctcaagatgggcggcgtggaagacgcgcacggcttcgcgctcaacacttcgaactaccgcgcgatggatgagctcttgccgttcggcaagaagctcagcgagctcctcggcggcgctcactacatcatcgacaccagccgcaacggtgcgggcccgctcggcgtcgaatggtgcaaccccccgggccgcaagctcggcctgccgccgacgctcgacaccgcggatcccgagcacatcgacgcttacctgtggctcaagcgtccgggcgaatctgacggttcgtgcaacggcgccccggtcgccggtgcgttctgggacaagcaggcgatcgaactcgcgcagtga

SEQ ID NO: 236 - protein, 366 aa, Unknown
  Obtained from environmental sample
MTLKHASSLIRGLSLWRGALGVLAVSLSLAACGGAQTGAPPTTGPASTALAPSNESGPPDDMPIVEAPKPPKATGNPLKGMKLWIDPETNAALRANALEKTQPEIAKLFREKIAKYSQALWLGEWNSNVYRKVKWTVDQASATGEVPTFILYNVPGRDCGQHSAGGLKTKESYQRWVRKIAAGVGDRAAIMVLEPDALGLLEKENCMTKEQQAERVFLLHDAIKVLRQNPKTIVYLDGGHSRWHPVEEHARLLKMGGVEDAHGFALNTSNYRAMDELLPFGKKLSELLGGAHYIIDTSRNGAGPLGVEWCNPPGRKLGLPPTLDTADPEHIDAYLWLKRPGESDGSCNGAPVAGAFWDKQAIELAQ

SEQ ID NO: 237 - DNA, 1101 bp, Unknown
  Obtained from environmental sample
atgaccctcaagcacgcctcttccctgatccgtggactctcactttggcgtggtgcgctcggcgtgctcgccgtctcgctgtcgctcgccgcttgcggtggcgcacagacgggggccccgcccacgaccggccccgccagcaccgcgctcgccccgacgaacgagagcggcccgcccgacgacatgcccatcgtcgaggcgccgacgccgcccaaggcgaccggcaacccgctgaaggggatgaagctctggatcgatccggagacgaacgccgccctccgcgccaacgcgctcgaaaagacccagcccgagatcgccaagctcttccgcgagaagatcgcgaaatactcgcaagctctctggctcggcgagtggagcagcaacgtctaccgcaaggtgaagtggaccgtcgaccaagcctccgcgacgggcgaagttccgaccttcatcctctacaacgtgcccggccgcgactgtggccagcactcggcgggcggtctgaagaccaaagagtcgtaccagcgctgggtgcgcaagatcgcggcgggcgtcggcgatcgcgcggccatcatggtgctcgagcccgacgcgctcggcttgctcgagaaggaaaactgcatgaccaaggagcagcaggccgagcgcgtgttcctgctgcacgacgcgatcaaggtgctgcaccagaacccgaagaccatcgtctacctcgacggcggccactcgcgctggcacccggtcgaagagcacgcccgcctgctcaagatgggcggcgtggaagacgcgcacggcttcgcgctcaacacctcgaactaccgcgcgatggatgagctcttgccgttcggcaagaagctcagcgagctcctcggcggcgctcactacatcatcgacaccagccgcaacggtgcgggcccgctcggcgtcgaatggtgcaaccccccgggccgcaagctcggcctgccgccgacgctcgacaccgcggatcccgagcacatcgacgcttacctgtggctcaagcgtccgggcgaatctgacggttcgtgcaacggcgccccggtcgccggtgcgttctgggacaagcgggcgatcgaactcgcgcagtga

SEQ ID NO: 238 - protein, 366 aa, Unknown
  Obtained from environmental sample
MTLKHASSLIRGLSLWRGALGVLAVSLSLAACGGAQTGAPPTTGPASTALAPTNESGPPDDMPIVEAPTPPKATGNPLKGMKLWIDPETNAALRANALEKTQPEIAKLFREKIAKYSQALWLGEWSSNVYRKVKWTVDQASATGEVPTFILYNVPGRDCGQHSAGGLKTKESYQRWVRKIAAGVGDRAAIMVLEPDALGLLEKENCMTKEQQAERVFLLHDAIKVLHQNPKTIVYLDGGHSRWHPVEEHARLLKMGGVEDAHGFALNTSNYRAMDELLPFGKKLSELLGGAHYIIDTSRNGAGPLGVEWCNPPGRKLGLPPTLDTADPEHIDAYLWLKRPGESDGSCNGAPVAGAFWDKRAIELAQ

SEQ ID NO: 239 - DNA, 1101 bp, Unknown
  Obtained from environmental sample
atgaccctcaagcacgcctcttccctgatccgtggactctcactttggcgtggtgcgctcggcgtgctcgccgtctcgctgtcgctcgccgcctgcggtggcgcacagacgggggccccgcccacgaccggccccgccagcaccgcgctcgccccgacgaacgagagcggtccgcccgacgacatgcccatcgtcgaggcgccgaagccgcccaaggctaccggcaacccgctgaaggggatgaagctctggatcgatcccgagacgaacgcggccctccgcgccaacgcgctcgaaaagacccagcccgagatcgccaagctcttccgcgagaagatcgcgaaatactcgcaagctctctggctcggcgagtggaacagcaacgtctaccgcaaggtgaagtggaccgtcgaccaagcctccgcgacgggcgaagttccgaccttcatcctctacaacgtcccgggtcgcgactgtggccagcactcggcgggcggtctgaagaccaaagagtcgtaccagcgctgggtgcgcaagatcgcggcgggcgtcggcgatcgcgcggccatcatggtgctcgagcccgacgcgctcggcttgctcgagaaggaaaactgcatgaccaaggagcagcaggccgagcgcgtgttcctgctgcacgacgcgatcaaggtgctgcgccagaacccgaagaccatcgtctacctcgacggcggccactcgcgctggcacccggtcgaagagcacgcccgcctgctcaagatgggcggcgtggaagaggcgcacggcttcgcgctcaacacttcgaactaccgcgcgatggatgagctcttgccgttcggcaagaagctcagcgagctcctcggcggcgctcactacatcatcgacaccagccgcaacggtgcgggcccgctcggcgtcgaatggtgcaaccccccgggccgcaagctcggcctgccgccgacgctcgacaccgcggatcccgagcacatcgacgcttacctgtggctcaagcgtccgggcgaatctgacggttcgtgcaacggcgccccggtcgccggtgcgttctgggacaagcaggcgatcgaactcgcgcagtga

SEQ ID NO: 240 - protein, 366 aa, Unknown
  Obtained from environmental sample
MTLKHASSLIRGLSLWRGALGVLAVSLSLAACGGAQTGAPPTTGPASTALAPTNESGPPDDMPIVEAPKPPKATGNPLKGMKLWIDPETNAALRANALEKTQPEIAKLFREKIAKYSQALWLGEWNSNVYRKVKWTVDQASATGEVPTFILYNVPGRDCGQHSAGGLKTKESYQRWVRKIAAGVGDRAAIMVLEPDALGLLEKENCMTKEQQAERVFLLHDAIKVLRQNPKTIVYLDGGHSRWHPVEEHARLLKMGGVEEAHGFALNTSNYRAMDELLPFGKKLSELLGGAHYIIDTSRNGAGPLGVEWCNPPGRKLGLPPTLDTADPEHIDAYLWLKRPGESDGSCNGAPVAGAFWDKQAIELAQ

SEQ ID NO: 241 - DNA, 2550 bp, Unknown
  Obtained from environmental sample
atgtctcggcactattacgcccgaggggcgatgttgttagcactgctaacgatgattggtggcctgttgaccacccagaatgccaagccaaccgccgccgcagccagctgtgtggtcacctatcgcattcccaacgattggggcagtggcttcctcggcgatgttaatattcaaaataatggtgcagccatcagtagctggacggttggctggagttttgctggcaatcagcaaattaccaacctctggaatggggttgtaacccaaactggcaatcaagtaacggtacgtaacgcaggctggaacggtgcgatcggcagcggtggcgcagttaactttggcttccaaggaacctacagcggtgctaacgctatcccaacggtgtttacattaaatggagtggtttgtggtgaaaccaacccaaatccaactgcaaccaccccaccaactgcaaccacacgcccaaccaacactatagttgtgccaccaaccaacacggctgtgccgcccaccagcacaactcgcccaaccaatacaaccgtgccaccaaccaacacggctgtgccaccaaccgcgaccaacggaccaaccagcacgccacgaccaaccaatacgccaacggttgtaccaccaaccagcaccccaacccaaccaggcgatgatacctacgatcaacgcttcttggaaatgtatgctgagttgaagaatccagccaatggctacttcagccttgaaggtgtgccttaccactcaatcgaaaccttgattgtggaagctcctgattatggccacgaaaccacttccgaagcctatagctattggttgtggctcgaagcaatgtacggcgaagcaactggcaactggcaaccattggccgatgcttggcgcaacatggaaatgtacatcattccaactagccaagatcaaccaagcagtggttcgtacaatgctaacagcccagccacctatgctggcgaatgggaacaaccaaacctttatccatcacaattgcaaaccaatgtttcagttggccaagacccaattgccgccgaattacgctcggcttatggcaccagcgatgtctatggcatgcactggttgctcgacgttgataactggtatggctatggccgccgcggcgatggcaccagcaaaccatcatatatcaacaccttccaacgcggcgctcaagaatcagtttgggaaaccgtgccccatccatcgtgggaaagcttcaatgatggcggccccttcggcttcttgaacttgttcactggcgatgctagctacgctcgccaatggcgctacaccaacgcccccgatgccgatgcccgcgctgtccaagcgatttactgggcaaaagtatgggccgacgaacaaggtggctcaccaatcgtcaatggtctggtaaccaaggctgccaagatgggcgactacttgcgttacgccttcttcgataaatacttcaagcaaattggctgtacctcaacctcgtgcccagcaggctcaggctacaacagcgctcactatctgttgtcgtggtactacgcttggggtggttcgattggcaatggcggcggctgggcatggcgcatcggcagcagccacaatcactttggctaccaaaacccaatggcagcctggattttgggcagccaaccagccttcaagccagcttcaaccaacggtgctcgcgactggaacatcagcttgacccgccaaattgagttctacacctggttgcaatcaagcgaaggcgcaattgctggcggtgctaccaacagctggaatggccgctacgaagcagctccagccggaaccagcaccttctacaatatggcctacgacgaaaaaccagtctatcacgatcctgccagcaacacctggtttggcttccaagcttggtcgatggagcgggtcgctgaatactactacgcttcgggcgatgtcaaagccaagaatgtgcttgacaagtgggtaacctgggctttggccaatactactttgaccagcaatggcagctatgaaattccatcaaccttggcttggagtggccaaccagttacgtggaacccaaccagcccagccgctaacaccaacttgcatgtcacggtcgtcgataagacccaagacgtgggtgttgccgccgcttatgccaagaccttgatgtattacagtgctgcaaccaagcgctatggcacgcaacacgtcgcttcgcaaactatggccaaagaattgatcgaccgcatgtggtcagagtatcgcgatgataagggtgttgctaaccccgaaactcgcaaagactacaatcgcttcgatgatcctgtatttgtgccaaacggctggactggcaccatggccaatggtgatccaatcaacaattcatcaaccttcttgagcattcgcaccaagtacgaagatgatccagccttcccagcagtgcaagcctacctcaatggtggccctgcgccaaccttcacctaccaccgcttctgggcccaagccgatatcgcaatggcttacgccgaatacgatcgcttgttccagtaa

SEQ ID NO: 242 - protein, 849 aa, Unknown
  Obtained from environmental sample
MSRHYYARGAMLLALLTMIGGLLTTQNAKPTAAAASCVVTYRIPNDWGSGFLGDVNIQNNGAAISSWTVGWSFAGNQQITNLWNGVVTQTGNQVTVRNAGWNGAIGSGGAVNFGFQGTYSGANAIPTVFTLNGVVCGETNPNPTATTPPTATTRPTNTIVVPPTNTAVPPTSTTRPTNTTVPPTNTAVPPTATNGPTSTPRPTNTPTVVPPTSTPTQPGDDTYDQRFLEMYAELKNPANGYFSLEGVPYHSIETLIVEAPDYGHETTSEAYSYWLWLEAMYGEATGNWQPLADAWRNMEMYIIPTSQDQPSSGSYNANSPATYAGEWEQPNLYPSQLQTNVSVGQDPIAAELRSAYGTSDVYGMHWLLDVDNWYGYGRRGDGTSKPSYINTFQRGAQESVWETVPHPSWESFNDGGPFGFLNLFTGDASYARQWRYTNAPDADARAVQAIYWAKVWADEQGGSPIVNGLVTKAAKMGDYLRYAFFDKYFKQIGCTSTSCPAGSGYNSAHYLLSWYYAWGGSIGNGGGWAWRIGSSHNHFGYQNPMAAWILGSQPAFKPASTNGARDWNISLTRQIEFYTWLQSSEGAIAGGATNSWNGRYEAAPAGTSTFYNMAYDEKPVYHDPASNTWFGFQAWSMERVAEYYYASGDVKAKNVLDKWVTWALANTTLTSNGSYEIPSTLAWSGQPVTWNPTSPAANTNLHVTVVDKTQDVGVAAAYAKTLMYYSAATKRYGTQHVASQTMAKELIDRMWSEYRDDKGVANPETRKDYNRFDDPVFVPNGWTGTMANGDPINNSSTFLSIRTKYEDDPAFPAVQAYLNGGPAPTFTYHRFWAQADIAMAYAEYDRLFQ

SEQ ID NO: 243 - DNA, 1437 bp, Unknown
  Obtained from environmental sample
atgcgcaatgcgatatttgtgattggcggaatagcgttgagtgtcagtgccctcggctgcggcggcgcaggtccgagcgaaggcggcgtcgcgagcacggatgccgctctgaagggccggtgcgtgaccacgagcacgaagttcttcgtgcctccgccggacccgggcgcggtcaagcaaaccgaacagctgctgcgcaagagaaaggtgctcgacgcgttggccatcgccaccattgaatccatcccgagcgcagtctggttcaacggcggtacaccgaccgaggtgcgccgctcggtgcagaagaccaccctcgctgccaagctggaaaaacgggtaccggtgctcgtggcttacaacctgccgtaccgcgactgcgcccaatattcttcgggcggcgcgctcgacacggccgcctacaagaagtggattgacggctttgccaacggcatcggcaagagcgacgcggtggtgatcctggaaccggacggtttgggtttgatcccatacaacaccaccatcttcaacgcgcaagagtggtgcaaaccgaccgtcacggacgcgagcggcgcgaccgttccggcgcccggcgccagcgctgacgaacgctatgctcaaattcagtacgccgtcgccagcctgaagagcctcgcgcccaacgctgatgtctacttggacgggacgcacagcgcctggctcggcgtgagcgaagccgcgtaccgcatctacaaggcgggcttcaaggacggcgtgcagcaggtgcagggcttctacgtcaacgcgtcgaactatcaaccgaccagtgacgcaactcagtttggcacctgggtgtcggactgcttggccgcggggacgcccggcgtcggtccgagctggatgcagaacgccgatacgggagttcctcatttcgagtggtgcccgggtcagtacgatccagagacgaacttcacgaaggtgaactacacgccggacttcgccgccggcatcaccgcgggcatcgaagggttgatgggtggggcgagcgcgcaagtgcacttcgtcatcgacaccagccgcaacggcaagggagtgttgaacagcgcgccgtatggcgccgcgccctacaatcaaccggccagcgtgctcgccgcgctcgactcgggcaattggtgcaacccctatggagccggcttgggcttgcggcctactgccagcacgggcgtcccgctcgtcgatgcctacctatggatcaagactcccgggcaatcggatggatcttgtgacattgccggcggggcgcgaggctgggactacaccgagtacaacacgtggggattgagcggcgacgcgctcaatcacttcgacccgctttggggattggtcgatccggccgccggtgattggttcccggagcaagcgttgcagctcgcccgcaacgccacgccgtccctgctctag

SEQ ID NO: 244 - protein, 478 aa, Unknown
  Obtained from environmental sample
MRNAIFVIGGIALSVSALGCGGAGPSEGGVASTDAALKGRCVTTSTKFFVPPPDPGAVKQTEQLLRKRKVLDALAIATIESIPSAVWFNGGTPTEVRRSVQKTTLAAKLEKRVPVLVAYNLPYRDCAQYSSGGALDTAAYKKWIDGFANGIGKSDAVVILEPDGLGLIPYNTTIFNAQEWCKPTVTDASGATVPAPGASADERYAQIQYAVASLKSLAPNADVYLDGTHSAWLGVSEAAYRIYKAGFKDGVQQVQGFYVNASNYQPTSDATQFGTWVSDCLAAGTPGVGPSWMQNADTGVPHFEWCPGQYDPETNFTKVNYTPDFAAGITAGIEGLMGGASAQVHFVIDTSRNGKGVLNSAPYGAAPYNQPASVLAALDSGNWCNPYGAGLGLRPTASTGVPLVDAYLWIKTPGQSDGSCDIAGGARGWDYTEYNTWGLSGDALNHFDPLWGLVDPAAGDWFPEQALQLARNATPSLL

SEQ ID NO: 245 - DNA, 1758 bp, Unknown
  Obtained from environmental sample
atgttgcatagaacgcccgttatccgccgaaaccgccggttgtcagccgccgcggtcgttttgtccgcgctggccgcgttcacattaaatgcacacgcgactactatggagaacataaggttaaaccagataggctattacccggagtcgcgcaaggtcgcggccgtggttatgggcgacgataagagcgcgccgtcggagtttcttgtcgtagggatgcctagcggcaagacggtctttcgggacaagctctccgccgagctttttttgtgggaggaggccggggagcgcggcttccgcgccgacttttcggcggtcagcgccccggggcagtacaaactcgtgattttgggcgacgtgccgtataagagcgagtcctacccgttcacgatctccgaccgaacgctcaaagacgcggcgaccgccgctatgcgaacctactactttcagcgttgctcttacgcgctctccaagaagtacgctggcaagtgggcccgcgccgccggacatccggatttagacgttacgtatcacccgtcgagcgggcattgggagggcgaagggaaggcggcggcgccgggcgggtggtacgacgcgggtgacttcggcaagtacatcgtcaactccggcataacggtggggacgctcttggccttctacgaacgcttccccaactacttccccgacaagagtttggacatcccggagtcgggcaacgggcggcccgatattctcgacgaggtgaagttcaacttggattggatgaagacgatgcaggacgttgacggcggcgtcttcttcaagctgactacgctcacgttccccggatacatcatgccggaggaggacaaggggcagaggttcataataggaaaaagcaccacatcgtcgctgaacttcgccgccgctatggcgatggcggggcgggtgtacgcgcccttcgacagcgtctacgcgaagaactgtattgagcgggcgctctcggcttgggattgggctgtgaagaaccctaacgcggtctttaagaatccggcggacgtaaagacaggtgagtacaaagacgcggctttcgacgatgaatttatttgggcggcggcggaactcttcatcaccgtgaaagaaaagcgcttcgccgatttcctgaaggggaaggatataacatacacgggcgaaccgtcatggcaaaatgttcattcattggcggccctttctctcgcgaccgtcaagaacggtttggatcagaatagattagaggccgtccgcaagtcgataacaaaaacagccgacaagtggctggcggagatggacaagcatctgtatagggtgccgaacatgaagttcatttggggctcgaactcgaacttcgccaacatgggcgtagggatgatctacgcgcatatcgtatccggcgatgataaatatcttttgggtgcgtccgagatagcggattatctgttggggaaaaacgccgtgggaatctcgttcgtcagcgcgttcggaacaaaggcgatgtcgaacccgcaccataggcaaagcgtggcgggaaaagtggggcctatcccgggattcttggcgggcggcccgaacgcaggtcagcaagacggtacgaacggggtgacgtattcgtcaaaattaccggcgaagagttacgaggacgtttacaagagctacgcttcgaatgaggtggcgataaattggaacgctccggcagtgtttttattcggggcgatagacgcgttgatgcatggtaggaaataa

SEQ ID NO: 246 - protein, 585 aa, Unknown
  Obtained from environmental sample
MLHRTPVIRRNRRLSAAAVVLSALAAFTLNAHATTMENIRLNQIGYYPESRKVAAVVMGDDKSAPSEFLVVGMPSGKTVFRDKLSAELFLWEEAGERGFRADFSAVSAPGQYKLVILGDVPYKSESYPFTISDRTLKDAATAAMRTYYFQRCSYALSKKYAGKWARAAGHPDLDVTYHPSSGHWEGEGKAAAPGGWYDAGDFGKYIVNSGITVGTLLAFYERFPNYFPDKSLDIPESGNGRPDILDEVKFNLDWMKTMQDVDGGVFFKLTTLTFPGYIMPEEDKGQRFIIGKSTTSSLNFAAAMAMAGRVYAPFDSVYAKNCIERALSAWDWAVKNPNAVFKNPADVKTGEYKDAAFDDEFIWAAAELFITVKEKRFADFLKGKDITYTGEPSWQNVHSLAALSLATVKNGLDQNRLEAVRKSITKTADKWLAEMDKHLYRVPNMKFIWGSNSNFANMGVGMIYAHIVSGDDKYLLGASEIADYLLGKNAVGISFVSAFGTKAMSNPHHRQSVAGKVGPIPGFLAGGPNAGQQDGTNGVTYSSKLPAKSYEDVYKSYASNEVAINWNAPAVFLFGAIDALMHGRK

SEQ ID NO: 247 - DNA, 1860 bp, Unknown
  Obtained from environmental sample
gtgtcctttttctttgctcaaataaagattttgaccttgaccctgccgccatatatattaataggtaaggccgtaaccgccgctatccacccgcccaaaggaggcacgttgcagaggacgcccgttatccgccgaaacagtcggctgtccgccgccgctgtcgttctgtccgcgttggcaacgttcaccataggcgctcacgcgaccaccatggaaaatatcaggttaaaccagatcggctactacccgaactcgcgtaaagtcgcgaccatagtcatgggcgacgacaagagcgtgccgtcggagtttctcgtcgtcggtctgcctggcggcaaggcggtctttaggggcaagctctccgccgagcttttcttgtgggaggagtcgggggaaagcggtttccgcgccgacttttccgcggtcagcgccccggggcagtacaagctcgtgattttgggcaacgtaccctacaagagcgagtcctacccgttcacgatatccgaccgcgccctcaaggacgtggccgccgcctctatgcgtacctactacttccagcgttgctcctacgctctatccaagaagtacgcggacaagtgggcccgcgccgccggacatccggatgcggatgttacctaccacccgtcaagcgggcattgggagggggaggggaaggttacgacgcccggcggctggtacgacgccggcgacttcggcaagtacgtcgtcaactccggcataacggtggggacgctcttggccttctacgaactctttcccggctacttccccgacaagagcttgaacataccggagtcgggcagcgggcgtcccgatattctcgacgaggtgaagtttaatttggattggatgaagacgatgcaggatgttgacggcggcgtgttcttcaaggtgaccacgctctcgtttcccgggtacgtcatgccggaagaggataagggtcagaggttcgtcataggcaagagcacgacgtcgtcgctgaacttcgccgcggctatggcgatggcggcaagggtgtacgcgccattcgacagcgcctacgcgaaaaactgcgccgagcgggccctcttggcctgggattgggcggtgaagaacccaaacgccgtgttcaagaatccggcggacgtcaagaccggcgagtacaaggacgcggccttcgacgacgagtttatatgggcggcggcggaacttttcatcaccacgaaagagaaacgcttcgccgattttcttaaaggcaaggaaatttcctacgccggcgaaccgtcgtggcaaaacgtccattctttggcggcgctctcgctcgcgtccgtcacgaacggcttggagccgcaacgcttggaagccatccgcaagtcgataacaaaaaccgccgacaagtggttatcggagatggacaagcacttatatagaataccgaacatgaagttcatctggggctcaaattcgagcttcgccaacatgggcgttgggatgatatacgcccgcatcatatccggcgacgataaatatctcttgggcgccgcggagatagccgattatctattagggaaaaacgcggttggaatatcatttgtcagtacgttcgggacaaaagcaatgtcgaacccgcaccataggcaaagcgtggcggggaaagtaggcccgatcccgggattcttagcgggcggtccgaacgccggtcaacaagacagcgcccacggggtgacatattcgtcaaaattaccggcaaagagttatgaagacgtttacaaaagctacgcctcaaacgaggtggcgataaattggaacgctccggcggtattcttattcggagcggtagacgcgttaatgcagaaaagataa

SEQ ID NO: 248 - protein, 619 aa, Unknown
  Obtained from environmental sample
MSFFFAQIKILTLTLPPYILIGKAVTAAIHPPKGGTLQRTPVIRRNSRLSAAAVVLSALATFTIGAHATTMENIRLNQIGYYPNSRKVATIVMGDDKSVPSEFLVVGLPGGKAVFRGKLSAELFLWEESGESGFRADFSAVSAPGQYKLVILGNVPYKSESYPFTISDRALKDVAAASMRTYYFQRCSYALSKKYADKWARAAGHPDADVTYHPSSGHWEGEGKVTTPGGWYDAGDFGKYVVNSGITVGTLLAFYELFPGYFPDKSLNIPESGSGRPDILDEVKFNLDWMKTMQDVDGGVFFKVTTLSFPGYVMPEEDKGQRFVIGKSTTSSLNFAAAMAMAARVYAPFDSAYAKNCAERALLAWDWAVKNPNAVFKNPADVKTGEYKDAAFDDEFIWAAAELFITTKEKRFADFLKGKEISYAGEPSWQNVHSLAALSLASVTNGLEPQRLEAIRKSITKTADKWLSEMDKHLYRIPNMKFIWGSNSSFANMGVGMIYARIISGDDKYLLGAAEIADYLLGKNAVGISFVSTFGTKAMSNPHHRQSVAGKVGPIPGFLAGGPNAGQQDSAHGVTYSSKLPAKSYEDVYKSYASNEVAINWNAPAVFLFGAVDALMQKR

SEQ ID NO: 249 - DNA, 1677 bp, Unknown
  Obtained from environmental sample
atgaaaaagtttttcaagctaatcggaattattacactcgcggcaataatcggattcacaatggcggcttgcggcggcggcgattccggcaaagaccccgacaatcaaaaacccggcgaagaaacgccaaagactcccgaaactcctcagtctttcaaagacataacagccgcgcaattagtttccgatataaaaatcggctggaatttgggcaacactctggacacttctaatttaacgtggctttcaaacccgacagtttctcaaatggaaacagcatggggcaaccccgttacgacaaaggcgatgattacctcgataaaaaacgcgggatttaacgcgattagaattcccgtgtcctggacaaaagccgcaagcggagcgccgaattacaccattcgcgccgactggatggcgagggttgtggaagttgtaaattacgccgctgacaacgacatgtatatcgttttgaacacccaccatgacgaggacgtattcacatttatgaattcaaacgccgcggcgggaaaggcggcattccaaaaaatctgggagcaaattgccgatacatttaaaaattacaacgagaaattgatctttgaaggattgaacgaaccgagaaccattggcggttccaatgaatggggcggcggcactgccgaagaacgcgccaacctgaattcttattacgccattttcttgaaagcggtaagagactcaggcggtaataatagtaagcgcatattgatgataaacccttatgccgcttccgttgatacagccgcgatgaacgcgttaacgctcccaactgacagcgcggtaaataaacttattgtttctttccattcttatagtccctatgattttgccctaaataaagactccgccaaaaacacgtggaacagcggcaattcctcggatacttcgccgattaccggccctattgaccgctattatacaaaatacgtaagtcagggcattcccgtaataatcggtgaattcggcgccatgaataaagacaatgaagctgtcagagcgcaatgggccgaatattatattagttacgcgcggagtaagggaatgaaatgtatttggtgggataataacgtaacatccggcgacggcgaaaaattcggcctgcttaacaggcagacaaatacttttccgtaccctacattacttaacgctatgatgaaaggaacgggcggcgctgatccgactccgactcctccgactccgccggttgcgccgacgcctccaaccattaccggaaatttgggcaattacaagtttggaactgatggaaacggcgctaactacacacaggctgtttggacactgtcagggacgaacttaacaaccgcgaaaacagcgggggcaaaattggcgctggtattatcagcagccccaacttctgtaatgcagtttgtgtggcaggggccggccaattccatctggtggaagcagaaagatgttcttggtaataccggcaatgccaccgcggcaggagttacatggaattcaggaacaaaaaccttaacaattccactgtccgcttcaactgttgaggattacaacacttttaccgcacagccatcattgaacattatcatcgcttattacggcggcgataacattaactctcttggcatagtaagcgcgaatattcagccgtaa

SEQ ID NO: 250 - protein, 558 aa, Unknown
  Obtained from environmental sample
MKKFFKLIGIITLAAIIGFTMAACGGGDSGKDPDNQKPGEETPKTPETPQSFKDITAAQLVSDIKIGWNLGNTLDTSNLTWLSNPTVSQMETAWGNPVTTKAMITSIKNAGFNAIRIPVSWTKAASGAPNYTIRADWMARVVEVVNYAADNDMYIVLNTHHDEDVFTFMNSNAAAGKAAFQKIWEQIADTFKNYNEKLIFEGLNEPRTIGGSNEWGGGTAEERANLNSYYAIFLKAVRDSGGNNSKRILMINPYAASVDTAAMNALTLPTDSAVNKLIVSFHSYSPYDFALNKDSAKNTWNSGNSSDTSPITGPIDRYYTKYVSQGIPVIIGEFGAMNKDNEAVRAQWAEYYISYARSKGMKCIWWDNNVTSGDGEKFGLLNRQTNTFPYPTLLNAMMKGTGGADPTPTPPTPPVAPTPPTITGNLGNYKFGTDGNGANYTQAVWTLSGTNLTTAKTAGAKLALVLSAAPTSVMQFVWQGPANSIWWKQKDVLGNTGNATAAGVTWNSGTKTLTIPLSASTVEDYNTFTAQPSLNIIIAYYGGDNINSLGIVSANIQP

SEQ ID NO: 251 - DNA, 2013 bp, Unknown
  Obtained from environmental sample
atgaaaaagatgttatttgcgtttgcgctgttcactgtcttctttgccgttagcgtgtacgcggcaccgactacccgctattgggactcctgcaagccgagctgcggttggtccgccaacgccggcggtaatccctgcgcgtcttgtgatgttaaaggcgctaaagacggcggcaacaatcaaagcgcttgcgccggtggaaattcgtacacctgcatgggccaggctccttgggccgtgagcgacaatttgtcctacggttttgcggctgctcactcaaacaacagttgcggaaagtgctttgagttgacttttaccagtggtatctccggtaaaaagatggtgattatggtgagcaacataggcgacataaaagaaggcgccgcgtttgaccttatgattcctgggggcggcgtgggtgatttcaatgccctaagtacgcaagttcaacagaatggcggtaacaattcaaatctaggcaatcgatggggaggctttagggcaacgtgcggcgccaacgaatcttgtattagaaagatgtgcgacgacgctttcagcaccccggcgcttgccgatatgaagcgcggctgctattggtacattgattggttcaaaatggccgataatcccaatgtcgactacaaagaggtatcttgtccggcggaattgacatcttcgtataaaaacggtacaagcggcggcggcaacgtaaccccgacccccacgacctatacgctcacggtcaataggaatccgaccgccggcggaaccactaatccgacgagccaatcaaacattaccgggggatcaaaggtcaatataacggccacagtagcgaacggttattcgttcaccaattggacggtaacgagcggaaacgccacattcgacaacgcgaacaacgcttccacaagcgtgaccgtgaacgggaacgtgaccatacaagccaatttcaagcaaaatcagaccacttatacgctgacagtcaaccgtaacccgacggctggcggatcggtgaaggtcaacaacgcagactactcggcgcctgtcacggtaaacggcgggacggcggtcagcatatcggctgccgcggcgagcgagtacacgtttaccggttgggcggtgaccagcggcactgcgcagataaacagcttaaacagcgcgaacacgacggtttcgttaagcgcaaacgccacgataaccgccaccttcacgcagaatcccacgacgcctacgacatacacgctgacggtcaaccgcagcccgacggccggaggatctgtgaaggtcgataacaaagactactcggcgccggtcacggtaaacggcgggacggcggtcagcatatcggctaccgcggcaagcgggtacaagttcacaagttggacggtatcgacgggcaccgcttccatcgccaacgcgagcaccgcggctacgaccgtcaccctaaccgcaaacgccacgattaccgccaacttcacatcaacggacatccccacgccgccgcagtccggcaacggcaaggacacaataaaggtcgaggcggagagctatacaagcaaggtcggcgccaacatgcagaccggttccgacgacggcagcaatgtcgtacgcataggttacatagaaaacgggtactcggcgacatacaataacgttatcgctccgcaggccggcgaatacgtcatgctgttcaggatcgccaccggcatggagcaaagctctttcacggtcaccgtgaacggcaaaaacgccggaacggtaagcaccaacaactcgggcggctggacctcctacgtaacggtagcgctcagttcaaaggtattgcttagcgggggcgacaatactgtggtgctgaactttcagaacgcgatcaacgtagactacttcctgctcgtaggcgataagccggttattgcgccgcccgagccgccgccgcagccgcccgaaccgccgaactccgtgaagtacaatgtagccaaaggaacccaacgtacgcaggtcctcgtgccg

SEQ ID NO: 252 - protein, 671 aa, Unknown
  Obtained from environmental sample
MKKMLFAFALFTVFFAVSVYAAPTTRYWDSCKPSCGWSANAGGNPCASCDVKGAKDGGNNQSACAGGNSYTCMGQAPWAVSDNLSYGFAAAHSNNSCGKCFELTFTSGISGKKMVIMVSNIGDIKEGAAFDLMIPGGGVGDFNALSTQVQQNGGNNSNLGNRWGGFRATCGANESCIRKMCDDAFSTPALADMKRGCYWYIDWFKMADNPNVDYKEVSCPAELTSSYKNGTSGGGNVTPTPTTYTLTVNRNPTAGGTTNPTSQSNITGGSKVNITATVANGYSFTNWTVTSGNATFDNANNASTSVTVNGNVTIQANFKQNQTTYTLTVNRNPTAGGSVKVNNADYSAPVTVNGGTAVSISAAAASEYTFTGWAVTSGTAQINSLNSANTTVSLSANATITATFTQNPTTPTTYTLTVNRSPTAGGSVKVDNKDYSAPVTVNGGTAVSISATAASGYKFTSWTVSTGTASIANASTAATTVTLTANATITANFTSTDIPTPPQSGNGKDTIKVEAESYTSKVGANMQTGSDDGSNVVRIGYIENGYSATYNNVIAPQAGEYVMLFRIATGMEQSSFTVTVNGKNAGTVSTNNSGGWTSYVTVALSSKVLLSGGDNTVVLNFQNAINVDYFLLVGDKPVIAPPEPPPQPPEPPNSVKYNVAKGTQRTQVLVP

SEQ ID NO: 253 - DNA, 2529 bp, Unknown
  Obtained from environmental sample
atgaaacggctcccaatcctgacgattctcgcgatctttgtcttttcgatcctgccgctctcggcgacacgcacgatcggcgttacgacgctcaaggtgcagtaccgcgccgccgacacgaatgccggcgataaccagatcaaaccgcacctcaacgtggtcaatacgacgaccggcagcgtacccttgagcgagctgaaaatccgctactggtacaccgtcgatggtgacaagccgcaaaattactggtgcgactacgcgaccgtcggctgcgccagcatcaccgcgcgcttcgtcaagctgacgacgccggtcgcgggtgtggcggattattacctggaagtcggtttcacgggcggcacgctggccgccggcggcaacaccggcgagatccagaatcgtttcgccaagaacgattggtccaactacaacgagaccggtgactactcgttcgatccgactaaaaccgccttcgccgactgggcgaaagtgacgctgtaccgcaacggcacgttgatctggggcaccgagccgggcggtacgcagccctcaccaagcccatcgccctcgccaagcccatcgccctcgccaagcccatcgccgagcccatcgccaacaccgccgccgaacgatgcctacacggcgcgcttccttgagctgtacaacgagatccatgatccggccaacggctatttcagccccgaaggcgtgccgtatcactcgatcgagacactgatcgtggaggcacccgactacggccacgaaacgacctccgaggcgtatagctactggatctggcttgaggcgatgtatggacgcgtgaccggcaactggcagccgctggccaatgcctgggccaacatggagcgctacatcacccccacaacgcaggatcagccgaccaacagcttctacaatgcttccaaaccggcgacctacgccagcgagtacgacacgcccaaccagtatccatcgcagctacagaccggtgtttcggtcggcgtcgatccgatcagcaacgagctgaagagcgcgtatggcacgtcggatgtgtacggtatgcactggctgctcgatgttgataactggtacggctacggcagccgcggcaacggcacgacccgaccggcctacatcaacaccttccagcgcggtccgcaagaatccgtgtgggaaacagtgccgcatccgtcgtgggatgccttcaacttcggcgggccgaacggatttctggatcttttcaccaaggacggctcctacacccggcagtggcgctacaccaacgcgcccgacgccgatgcccgcgcgatccaggcgctctactgggccaaggtttgggccgatcagcagggcggatcaccgatcgtcaatgggctggtcgctaaagccgcgaagatgggcgattacctgcgctactcgatgttcgacaaatattttaagcgcatcggctgtacctcgacaagctgcccggctggcaccggctacgacagcgcgcactatctgctgtcgtggtactacgcctggggtggcgcggcagatccgagcgcgggctgggcctggcgcatcggatcgagccacaaccactttggctatcaaaatccgtccgcggcctgggtactgagcaacaacgccgcgttcaagcccgcctcgccgaacgccgcgcgtgactggggcaccagcttgcagcggcagatcgagttctatcgctggctccagtcggctgacggcgcgatcgccggcggtgcgaccaatagctggcagggcgcgtacgcagcgccgccagccggcacgacgaccttctacagcatggcctacgacgagaagccggtttatcacgatccagccagcaacacctggttcggcttccaggcctggtcgatggagcgcgtcgccgaatactactacgccaccaacgacaccaaggccaagctgattctcgacaagtgggttgcctgggcgcgggccaacacccggctcaacgccgacggcacctacgcaatcccttcgacgctgagctggagcggtaagccggggctgagctggaataccaccacgcagaactggaacgccgccgacgcgacctataatgcgaatctgcgcgtgacaatcgtggatacgacacaggacgtgggtatcacggcggcgctggccaaaacgctgatgtactacgccgccaaatcaggcgataccgcatccaaaaccctggccaaagagctgatcgatcgcatgtggaccaagtaccgcgatcctcagggcgtttcgattgccgagacgcgcgccgactacaaccgcttcgacgatccgatcttcgttccggcgggctggagcggtcgcatgcccaacggcaatccgatcaactccacctcgacgttcttgagcatccgctcgaagtacgccagcgatcctgacttcgccaaggtccagagctacctcaacggcggcccggcaccgaccttccgctaccatcgcttctgggcgcagaccgacatcgcgctggccaacgccgagtattcgcggctcttcccctag

SEQ ID NO: 254 - protein, 842 aa, Unknown
  Obtained from environmental sample
MKRLPILTILAIFVFSILPLSATRTIGVTTLKVQYRAADTNAGDNQIKPHLNVVNTTTGSVPLSELKIRYWYTVDGDKPQNYWCDYATVGCASITARFVKLTTPVAGVADYYLEVGFTGGTLAAGGNTGEIQNRFAKNDWSNYNETGDYSFDPTKTAFADWAKVTLYRNGTLIWGTEPGGTQPSPSPSPSPSPSPSPSPSPSPSPTPPPNDAYTARFLELYNEIHDPANGYFSPEGVPYHSIETLIVEAPDYGHETTSEAYSYWIWLEAMYGRVTGNWQPLANAWANMERYITPTTQDQPTNSFYNASKPATYASEYDTPNQYPSQLQTGVSVGVDPISNELKSAYGTSDVYGMHWLLDVDNWYGYGSRGNGTTRPAYINTFQRGPQESVWETVPHPSWDAFNFGGPNGFLDLFTKDGSYTRQWRYTNAPDADARAIQALYWAKVWADQQGGSPIVNGLVAKAAKMGDYLRYSMFDKYFKRIGCTSTSCPAGTGYDSAHYLLSWYYAWGGAADPSAGWAWRIGSSHNHFGYQNPSAAWVLSNNAAFKPASPNAARDWGTSLQRQIEFYRWLQSADGAIAGGATNSWQGAYAAPPAGTTTFYSMAYDEKPVYHDPASNTWFGFQAWSMERVAEYYYATNDTKAKLILDKWVAWARANTRLNADGTYAIPSTLSWSGKPGLSWNTTTQNWNAADATYNANLRVTIVDTTQDVGITAALAKTLMYYAAKSGDTASKTLAKELIDRMWTKYRDPQGVSIAETRADYNRFDDPIFVPAGWSGRMPNGNPINSTSTFLSIRSKYASDPDFAKVQSYLNGGPAPTFRYHRFWAQTDIALANAEYSRLFP

SEQ ID NO: 255 - DNA, 2547 bp, Unknown
  Obtained from environmental sample
atgaaacggctcccaatcctgacgatcctcgcgatcttcgtcttttcgattctaccgctctcagccacgcgcacaatcggcgttacgacgcttaaagtgcagtaccgcgccgccgacaccagcgccggcgacaaccagatcaagccgcatctcaacgtggtcaatacgacgaccagcagcgtgccgctcaacgagctcaaaatccgctactggtacacggtcgacggcgacaagccgcaaaattactggtgtgattacgcgaccgttggctgtgcgaatatcaccgcgcgcttcgtcaagctcacgacgccggtcgcgggcgtggcggattattacctcgaagttggcttcacgggcggcacgctggcggcgggtggcagcaccggcgagatccagaagcgctttgccaagaacgactggacgaattacaacgagagcggcgactattccttcgatccgactaagaccgcgtttgccgattggtcacgtgttacgctctaccgcaacggcacgctgatctggggcaccgagccgggcggcacgcagccatcgccaagtccatcaccgagcccatcgccgagtccgtcgccgagcccatcgccaagcccgtcaccatcgccgagtccgtcgccaacaccgccgccaaatgatgcttacacggcgcgcttccttgagctgtacaacgagatccacgatccggccaacggctatttcagccccgaaggcgtgccgtatcactcgatcgagacgctgattgtggaagcacccgaccacggccacgagacgacttcggaggcctatagctactggatctggcttgaagcgatgtatggccgcgtgaccggcaactggcagccgctggccaatgcctgggctaacatggagcgctacatcatcccgacgacgcaggatcagccgaccaacagcttctataatccatccaggccggcgacctacgccagcgaatacgacacgcccaaccagtatccgtcacagctgcaaaccggcgtttccgtcggcgtcgatccgatcggcaatgagctgaagaatgcgtacggcacatcggatgtgtacggcatgcactggctgctcgacgtggacaactggtacggtttcggcagccgcggcaacggcacgacccgaccgtcatacatcaacaccttccggcgcgggccgcaggagtcggtgtgggagacggtgccgcatccgtcgtgggatgcctttaacttcggcgggccgaatggcttcctggatcttttcaccagggatggctcatacgcgcggcagtggcgctacaccaacgcgcctgacgccgatgcgcgcgcgatccaggcgctctactgggccaaggtttgggccgatcagcaaggtggctcaccgatcgtcaatggtctggtcgccaaagccgccaagatgggcgattacctgcgctactcgatgttcgacaaatatttcaagcgcatcggctgcacctcgacaagctgcccggctggcaccggctacgacagcgcgcactatctgctatcgtggtattacgcctggggcggcgcggcagatccgagcgcgggctgggcctggcgcatcggatcgagccacaaccacttcggctatcaaaatccgttcgcggcctgggtgctgagcaataatgccgcgttcaagccggcctcgccgaacgccgcccgtgactggggcaccagcttgcagcgccagatcgagttctaccgctggctgcagtcggctgacggcgcgatcgccggtggcgcgaccaatagctggcagggcgcctacgcagcaccgccagccggcacgacgaccttctacagcatggcctacgacgaaaagccggtttatcacgatccggccagcaacacctggttcggcttccaggcctggtcgatggagcgcgtcgccgagtactactacgccactaacgacgccaaggccaagctaattctcgacaaatgggtcgcctgggcgcgggccaacacccggctcaacgccgacggcacctacgcgattccttcgacgctgagctggagcggcaagccgggcctgagctggaacgccactacgcagaattggaacgccgccgacgcgacctacaatgcgaatttgcgcgtgacgatcgtggatacgacgcaggacgtgggcatcacggcggcgctggctaaaacgctgatgtactacgccgcaaggtcgggcgataccgcatccaaaaccctggccagagagttgatcgaccgcatgtggaccaagcatcgcagtcctaagggcgtttcgattgtcgagacgcgcgccgactacaaccgcttcgacgatcagatcttcgttccgacgggctggaccggtcgcatgcccaacggcgatccgatcaactccacctcgacgttcttgagcatccgctcgaagtacgccagcgatcccgactttgccaaggtccagagctatctcaacggcggtccggcaccaaccttccgctaccatcgcttctgggcgcagaccgacattgcgctggccaacgccgaatattcgcggctcttcccctag

SEQ ID NO: 256 - protein, 848 aa, Unknown
  Obtained from environmental sample
MKRLPILTILAIFVFSILPLSATRTIGVTTLKVQYRAADTSAGDNQIKPHLNVVNTTTSSVPLNELKIRYWYTVDGDKPQNYWCDYATVGCANITARFVKLTTPVAGVADYYLEVGFTGGTLAAGGSTGEIQKRFAKNDWTNYNESGDYSFDPTKTAFADWSRVTLYRNGTLIWGTEPGGTQPSPSPSPSPSPSPSPSPSPSPSPSPSPSPTPPPNDAYTARFLELYNEIHDPANGYFSPEGVPYHSIETLIVEAPDHGHETTSEAYSYWIWLEAMYGRVTGNWQPLANAWANMERYIIPTTQDQPTNSFYNPSRPATYASEYDTPNQYPSQLQTGVSVGVDPIGNELKNAYGTSDVYGMHWLLDVDNWYGFGSRGNGTTRPSYINTFRRGPQESVWETVPHPSWDAFNFGGPNGFLDLFTRDGSYARQWRYTNAPDADARAIQALYWAKVWADQQGGSPIVNGLVAKAAKMGDYLRYSMFDKYFKRIGCTSTSCPAGTGYDSAHYLLSWYYAWGGAADPSAGWAWRIGSSHNHFGYQNPFAAWVLSNNAAFKPASPNAARDWGTSLQRQIEFYRWLQSADGAIAGGATNSWQGAYAAPPAGTTTFYSMAYDEKPVYHDPASNTWFGFQAWSMERVAEYYYATNDAKAKLILDKWVAWARANTRLNADGTYAIPSTLSWSGKPGLSWNATTQNWNAADATYNANLRVTIVDTTQDVGITAALAKTLMYYAARSGDTASKTLARELIDRMWTKHRSPKGVSIVETRADYNRFDDQIFVPTGWTGRMPNGDPINSTSTFLSIRSKYASDPDFAKVQSYLNGGPAPTFRYHRFWAQTDIALANAEYSRLFP

SEQ ID NO: 257 - DNA, 2541 bp, Unknown
  Obtained from environmental sample
atgaaacggctcccaatcctgacgattctcgcgatctttgtcttttcgatcctgccgctctcggcaacacgcacaatcggcgttacaacgctgaaagtgcagtatcgcgctgccgacacgaatgccggcgataaccagatcaagccgcatctcaacgtagtcaatacgacgaccagcagcgtgccgctcagcgagttgaaaatccgctactggtacaccgtcgatggcgacaagccgcaaaattactggtgtgactacgcgaccgtcggctgcgccaacattaccgcacgtttcgtcaagctcacgacgccggtcgcaggtgtggcggattattacctggaagtcggctttacgggcggcacgctggcagctggcggcagcaccggcgagatccagaatcgtttcgccaagaacgattggtccacctacaacgagaccggcgactattccttcgatccgactaaaactgcgtttgccgactggacgaaagtgacgctctaccgcaacggcacgctgatctggggcaccgagccgggcggtacacagccctcgccaagtccgtcaccaagtccgtcgccaagtccgtcaccgagcccgagtccgtcacccagcccaagcccatcgccaacaccgccgccgaacgatgcctacacggcgcgcttccttgagctgtacaacgagatccacgatccggccaacggctatttcagccccgaaggcgtgccgtatcactcgatcgagacgctgatcgtagaggcacccgactacggccatgaaacaacatctgaggcctatagttactggatctggcttgaggcgatgtatggacgcgtgacgggcaactggcagccgttggctaatgcctgggccaacatggagcgctacatcatccccgcgacgcaggatcagccgaccaacagcttctacaacccatccaagccggcgacctacgccggcgagtacgacacgcccaaccagtatccctcgcagctacagaccggcgtttcggtcggcatcgatccgatcggcaacgagctgaagagcgcatacggtacggcggatgtgtatggcatgcactggctgctcgacgtggataactggtacggttacggcagccgcggcaacggcacgacccgaccagcctacatcaatacatttcagcgcgggccgcaagaatccgtgtgggaaacagtgccgcatccgtcgtgggatgccttcaacttcggcggcccgaacggctttctggatcttttcaccagggacggctcctacacacgccagtggcgctacaccaacgcgcccgacgccgatgcccgcgcgatccaggcgctctactgggccaaggtctgggccgatcagcagggtggctcaccgatcgtcaatgggctggtcgctaaagccgcgaagatgggcgattacctgcgctactcgatgttcgacaaatattttaagcgcatcggctgcacctcgacgagctgcccggctggcaccggctacgacagcgcgcactatctgctgtcgtggtactacgcctggggcggcgcggcagatcccagcgcgggctgggcctggcgcatcggatcgagccacaaccacttcggctatcaaaatccgttcgcggcctgggtactgagcaataatgccgcgttcaaacccgcctcgccgaacgccgcccgtgactggggcaccagcttgcagcggcagatcgagttctatcgctggctacagtcggctgacggcgcgattgccggtggcgcgaccaatagctggcagggcgcgtacgccacaccgccagccggcacgacaaccttctacagcatggcctacgatgagaagccggtttatcacgatccggccagcaacacctggttcggcttccaggcctggtcgatggagcgcgtcgccgagtactactacgccaccaacgacgccaaagccaagctaattctcgacaagtgggttgcctgggcgcgggccaacacccggctcaacgccgatggcacctacgcgattccttcgacgctgagctggagcggcaagccggggctgaactggaataccaccacacaaaactggaacgccgccgacgcgacctataacgcgaatctgcgcgtaacgatcgtggatacgacgcaggacgtgggcatcacggcggcgctggccaaaacgctgatgtactacgccgcgaagtcaggcgataccgcctccaaaacgctggccaaagagctgatcgatcgtatgtggaccaagtatcgcgatcctcagggcgtttcgattaccgagacgcgcgccgactacaaccgcttcgacgatccgatcttcgttccggcgggctggagcggtcgcatgcccaacaacgatccgatcaactccacctcgacgttcttgagcatccgctcgaagtacgccagcgatcccgacttcgccaaagtccagagctatctcaacggcggcccggcaccaaccttccgctaccatcgcttctgggcgcagaccgatattgcgctggccaacgccgaatattcgcggctcttcccctag

SEQ ID NO: 258 - protein, 846 aa, Unknown
  Obtained from environmental sample
MKRLPILTILAIFVFSILPLSATRTIGVTTLKVQYRAADTNAGDNQIKPHLNVVNTTTSSVPLSELKIRYWYTVDGDKPQNYWCDYATVGCANITARFVKLTTPVAGVADYYLEVGFTGGTLAAGGSTGEIQNRFAKNDWSTYNETGDYSFDPTKTAFADWTKVTLYRNGTLIWGTEPGGTQPSPSPSPSPSPSPSPSPSPSPSPSPSPTPPPNDAYTARFLELYNEIHDPANGYFSPEGVPYHSIETLIVEAPDYGHETTSEAYSYWIWLEAMYGRVTGNWQPLANAWANMERYIIPATQDQPTNSFYNPSKPATYAGEYDTPNQYPSQLQTGVSVGIDPIGNELKSAYGTADVYGMHWLLDVDNWYGYGSRGNGTTRPAYINTFQRGPQESVWETVPHPSWDAFNFGGPNGFLDLFTRDGSYTRQWRYTNAPDADARAIQALYWAKVWADQQGGSPIVNGLVAKAAKMGDYLRYSMFDKYFKRIGCTSTSCPAGTGYDSAHYLLSWYYAWGGAADPSAGWAWRIGSSHNHFGYQNPFAAWVLSNNAAFKPASPNAARDWGTSLQRQIEFYRWLQSADGAIAGGATNSWQGAYATPPAGTTTFYSMAYDEKPVYHDPASNTWFGFQAWSMERVAEYYYATNDAKAKLILDKWVAWARANTRLNADGTYAIPSTLSWSGKPGLNWNTTTQNWNAADATYNANLRVTIVDTTQDVGITAALAKTLMYYAAKSGDTASKTLAKELIDRMWTKYRDPQGVSITETRADYNRFDDPIFVPAGWSGRMPNNDPINSTSTFLSIRSKYASDPDFAKVQSYLNGGPAPTFRYHRFWAQTDIALANAEYSRLFP

SEQ ID NO: 259 - DNA, 2535 bp, Unknown
  Obtained from environmental sample
atgaaacggctcccaatcctgacgattctcgcgatctttgtcttttcgatcctgccgctctcggcgacacgcacgatcggcgttacgacgctcaaagtgcagtatcgcgctgccgacaccaacgccggcgataaccagatcaagccgcatctcaacgtggtcaatacgacaaccggcagcgtgccgctgagcgagctaaagatccgctactggtacaccgtcgacggcgacaagccccagagctactggtgcgattacgccacagttggctgtgccaatatcactgcgcgcttcgtcaagctcacgacgccggtcaccggtgtggcggattattacctggaagttggtttcacgggcggcacgctggcagcgggtagcagcaccggcgagatccagaatcgcttcgccaagaacgactggaccaactataacgaaaccggcgactattctttcgatccgaccaaaaccgcgtttgccgattgggcgaaagtgacgctctatcgcaacggcacgctgatctggggtactgagccgggcggcacgcagccaagtccctcgccaagtccatcaccgtcgccaagtccctcgccaagtccctcgccgtcgccaagtccatcgccgacaccaccgcccaacgatgcctacacggcgcgcttccttgagatgtacaacgaaatccatgatccggccaatggctacttcagccctgaaggtgtaccgtatcactcgatcgaaacgttgatcgtggaggcacccgactacggccatgaaacgacgtccgaggcctatagctactggctctggcttgaagcgatgtatggccgcgtgaccggcaactggcagccgctggccaatgcctgggccaacatggagcgctacatcatcccgacgacgcaggatcagccgaccaacagcttctacaatgcttccaagccggcgacctacgccagcgagtacgacacgcccaaccagtatccatcgcagctacagaccggcgtttccgtcggcgtcgatccgatcggcaatgagctgaagagcgcgtacggcacgtcggatgtgtacggcatgcactggctgctcgacgtggataactggtacggctacggcagtcgcggcaacggcacgacccgtccggcgtacatcaacaccttccagcgcgggccgcaggagtcggtgtgggaaacggtgccgcatccgtcgtgggatgccttcaactttggcggaccaaacggtttcctggatcttttcaccaaggatagctcctacacgcggcagtggcgctacaccaacgcccccgacgccgatgcccgcgcgattcaggcgctctactgggccaaagtctgggccgatcagcagggtggctcgccgatcgtcaatgggctggtcgccaaagccgcgaaaatgggcgattatctgcgctactcgatgttcgacaaatacttcaagcgcatcggctgcacctcgacgagctgcccggctggcaccggctacgacagcgcgcactatctgctgtcgtggtactacgcctggggcggcgcggcagatccaaacgcgggctgggcctggcgtatcggatcgagccacaatcacttcggctaccagaatccgttcgcggcctgggtgctgagcaataatgccgcgttcaagccagcctcgccgaacgccgcccgcgactggggtaccagcttgcagcgacagatcgagttctaccgctggctccagtcggcagatggcgcgatcgccggcggcgcgacgaatagctggcagggcgcgtacgcagcaccgcccgccggcgcgacaaccttctacagcatggcctacgacgagaagccggtttatcacgatccggccagcaacacctggtttggcttccaggcctggtcgatggagcgcgtcgccgagtactactacgccgccaacgacgccaaggccaagctaattctcgacaaatgggttgcctgggcgcgggccaacacccggctcaacgccgacggcacctacgcgattccttcgacgctgagctggagcggcaagccggggctgagctggaacgctaccacgcagaactggagcgccgccgacgcgacctataatgcgaatctacgcgtgacgatcgtggatacgacgcaggacgtgggtatcactgcggcgctggccaaaacgctgatgtactacgccgccaagtcaggcgacaccgcatccaagacgctggctaaagagctgatcgaccgcatgtggaccaagtatcgcgatcccaagggcgtttcgattgccgagacgcgcgccgattacaaccgcttcgacgatccgatctatgttccaacgggctggagcgggcgcatggccaacaacgatccgaccaactccacctcgacgttcttgagcatccgctcgaagtacgccagcgaccctgacttcgccaaggtccagagctatctcaacggcggcccagctcccagcttccgctaccatcgcttctgggcgcagaccgacatcgcgctggccaacgccgagtactcgcggctcttcccttag

SEQ ID NO: 260 - protein, 844 aa, Unknown
  Obtained from environmental sample
MKRLPILTILAIFVFSILPLSATRTIGVTTLKVQYRAADTNAGDNQIKPHLNVVNTTTGSVPLSELKIRYWYTVDGDKPQSYWCDYATVGCANITARFVKLTTPVTGVADYYLEVGFTGGTLAAGSSTGEIQNRFAKNDWTNYNETGDYSFDPTKTAFADWAKVTLYRNGTLIWGTEPGGTQPSPSPSPSPSPSPSPSPSPSPSPSPTPPPNDAYTARFLEMYNEIHDPANGYFSPEGVPYHSIETLIVEAPDYGHETTSEAYSYWLWLEAMYGRVTGNWQPLANAWANMERYIIPTTQDQPTNSFYNASKPATYASEYDTPNQYPSQLQTGVSVGVDPIGNELKSAYGTSDVYGMHWLLDVDNWYGYGSRGNGTTRPAYINTFQRGPQESVWETVPHPSWDAFNFGGPNGFLDLFTKDSSYTRQWRYTNAPDADARAIQALYWAKVWADQQGGSPIVNGLVAKAAKMGDYLRYSMFDKYFKRIGCTSTSCPAGTGYDSAHYLLSWYYAWGGAADPNAGWAWRIGSSHNHFGYQNPFAAWVLSNNAAFKPASPNAARDWGTSLQRQIEFYRWLQSADGAIAGGATNSWQGAYAAPPAGATTFYSMAYDEKPVYHDPASNTWFGFQAWSMERVAEYYYAANDAKAKLILDKWVAWARANTRLNADGTYAIPSTLSWSGKPGLSWNATTQNWSAADATYNANLRVTIVDTTQDVGITAALAKTLMYYAAKSGDTASKTLAKELIDRMWTKYRDPKGVSIAETRADYNRFDDPIYVPTGWSGRMANNDPTNSTSTFLSIRSKYASDPDFAKVQSYLNGGPAPSFRYHRFWAQTDIALANAEYSRLFP

SEQ ID NO: 261 - DNA, 1608 bp, Unknown
  Obtained from environmental sample
atgacaaaaagaaaaaattccaaatggaaaatagtaatagcatgtatcgttgtggttcttcttgtggttgctgggagtgtttatttttggcagaacaatctttcgaagaagtctggtgatgaaaccacagcaaccgattctacactcagtaatagtgttgataccaagaagagttcagaaacagatacacagtcagacaaggatataaccgagagtataagcgattccactgaaaacccccagaatagtgatactccggtggaaaagcatggagctttatccgtaaagaaaattgacagctacgaagcaccaaccattgtagaccaacaagggaacgccgtacagcttcgggcggcaagtacacatggagtgcattggttcccggaatatgtaaataaagatggatttcaaagtttgcgtgacgaatggggattaaataccgttcgcctggcgatttaccccagagagggtggttatttgcaaggcaaccagaccttgttagatagcaagattgctgagggagtagaagcggcaaaagagcttggtatgtatgtaatcattgactggcatgtgcttgcttataatcccaatgaagacttggaggtagctaagaatttctttcaaaaatatgcagagcagtataaggattataacaatgtaatatttgaaatttgcaatgaaccaacagggacaccctggtatgatgaaagcgggaatgatatttatacctattgtaaagaagtttctaaggtaattcgtgattgtggaaataatagtattattatttgcggaacgaatgactggtcacagcgtgtagatgaggtggctgcaaaaccattaaaagatgatggatttgagaatatcatgtacagcatacatttttatgcaggtacgcactatgataatataaaaaataatgttagaagtgcaatttcccatggaacacctgtatttgccagtgaatttgggtgttgtgatgcttcgggaaatgggggatatgactttgctaatgcagacgattggatgaaccttttgaaagaaaataatataagctatgcatgttggagtttgtgcaacaaagcagaatctgcttcctacataagtccttcctgttctaaaacaagtggatggacaacttcggatttaacagagaccggtgtatggttgatgaataccagccgtggattagcagaagcggaagaaggaactatgagtgtgggagcaccggtagaatctgataaatcagaaacaacggataaatcagaaaaatccgataaagcgcagacgattgcccaggaggcatcaacaaatggctgttctgcaaccattgttattggaaatgagtgggatgatggtgttacagcagatggtgtagtaaagaatgaaagtagtaatggaatatccggttggacagtagaatttgattttggaggagagatttctaacatttggtgtgccaagatggtcagtcattcaggaagccattatgtaatagaagcagaagattataataaagaggttggtagcggagaacaggttacattcggatttaatgccacaaaagcggcaggacagaaggtaaccattacaaatgtggtagtaaaatag

SEQ ID NO: 262 - protein, 535 aa, Unknown
  Obtained from environmental sample
MTKRKNSKWKIVIACIVVVLLVVAGSVYFWQNNLSKKSGDETTATDSTLSNSVDTKKSSETDTQSDKDITESISDSTENPQNSDTPVEKHGALSVKKIDSYEAPTIVDQQGNAVQLRAASTHGVHWFPEYVNKDGFQSLRDEWGLNTVRLAIYPREGGYLQGNQTLLDSKIAEGVEAAKELGMYVIIDWHVLAYNPNEDLEVAKNFFQKYAEQYKDYNNVIFEICNEPTGTPWYDESGNDIYTYCKEVSKVIRDCGNNSIIICGTNDWSQRVDEVAAKPLKDDGFENIMYSIHFYAGTHYDNIKNNVRSAISHGTPVFASEFGCCDASGNGGYDFANADDWMNLLKENNISYACWSLCNKAESASYISPSCSKTSGWTTSDLTETGVWLMNTSRGLAEAEEGTMSVGAPVESDKSETTDKSEKSDKAQTIAQEASTNGCSATIVIGNEWDDGVTADGVVKNESSNGISGWTVEFDFGGEISNIWCAKMVSHSGSHYVIEAEDYNKEVGSGEQVTFGFNATKAAGQKVTITNVVVK

SEQ ID NO: 263 - DNA, 2523 bp, Unknown
  Obtained from environmental sample
atgaaacggctcccgatcctgacgattctcgcgatcttcgtcttttcgatcctgccgctctcggccacgcgcacgatcggcgttacgacgctcaaagtgcagtaccgcgccgccgacacgagcgccggtgataaccaaatcaagccgcatctcaacgtggtcaatacgacgaccagcagcgtgccgctcagtgagctcaaaattcgctactggtacaccgtcgacggcgacaagccgcaaaattactggtgcgattacgcgaccgtaggctgcgccaacattacggcgcgcttcgtcaagctcacaacgccggtcgcgggcgtggcggattattatctggaagtcggcttcacgggtggcacgctggcagcgggcggcagcaccggcgagatccagaatcgctttgccaagaacgactggacgaattacaacgagaccggcgactattcgttcgatccgaccaagacggcgtttgccgattggtcacgcgtcaccctgtatcgcaacggcacgctaatctggggcaccgagccgggcggcacgcagccatcgccaagtccgtcacccagcccatcgccaagtccgtcacccagcccaagcccgtcgccaacaccgccgccaaatgatgcttacacggcgcgcttccttgagctgtacaacgagatccacgatccagccaacggctatttcagccccgaaggcgtgccgtatcactcgatcgaaacgctgattgtggaagcgcccgaccacggccacgagacgacttccgaggcctatagctactggatctggcttgaggcgatgtatggtcgcgtgaccggcaactggcagccgctggccaacgcctgggccaacatggagcgatacatcatcccgacgacgcaggatcagccgaccaatggcttctacaatccatccaggccggcgacctacgccagcgagtacgacacgcccaaccagtatccgtcgcagctgcaaaccggcgtttctgtcggcgtcgatccgatcggcaacgagctgaagagcgcgtacggcacatcggatgtgtacggcatgcactggctgctcgacgtggacaactggtacggtttcggcagtcgcggcaacggcacgacccgaccgtcatacatcaacaccttccagcgcgggccgcaggagtcggtgtgggagacagtgccgcatccgtcgtgggatgcctttaacttcggcggaccgaacggtttcctggatcttttcaccagggatggctcatacgctcgccagtggcgctacaccaacgcgcctgacgccgatgcgcgcgcgatccaggcgctttactgggccaaggtttgggccgatcagcagggcggctcgccaatcgtcaatgggctggtcgccaaagctgccaagatgggtgattacctgcgctactcgatgttcgacaaatacttcaaacgcatcggctgcacctcgacgagctgcccggctggcaccggctatgacagcgcgcactatctgctgtcgtggtactacgcctggggcggcgcggcagatccgagcgcgggctgggcctggcgcatcggatcgagccacaaccacttcggctatcaaaatccgttcgcggcctgggtgctgagcaataacgccgcgttcaagcccgcctcgccgaacgccgcccgcgactggggcaccagcttgcagcggcagatcgagttctaccgctggctccagtcggctgacggcgcgatcgccggtggcgcgaccaatagctggcagggcgcctacgcagcaccgccagccggcacgacgaccttctacagcatggcctacgacgagaagccggtttatcacgatccggccagcaacacctggttcggattccaggcctggtcgatggagcgcgtcgccgagtactactacgctaccaacgacgccaaggccaagctaattctcgacaaatgggtcgcctgggcgcgggccaacacccggctcaacgccgacggcacctacgcgatcccttcgacgctgagctggagcggcaagccgggcctgagctggaacgccactacgcagaactggaacgccgccgacgcgacctacaatgcgaatttgcgcgtgacgatcgtggatacgacgcaggacgtgggcatcacggcggcgctggctaaaacgctgatgtactacgcggctagatcgggtgataccgcatccaaaaccctggccaaagagttgatcgatcgcatgtggaccaagtatcgcgatcccaagggcgtttcgattgtcgagacgcgcgccggctacaaccgcttcgacgatcagatcctcgttccgacgggctggaccggtcgcatgcccaacggcgatccgatcaactccacctcgacgttcttgagcatccgctcgaagtacgccagcgatcccgacttcgccaaggtccagagctatctcaacggcggtccggcaccgaccttccgctaccatcgcttctgggcgcagaccgacattgcgctggccaacgccgagtattcgcggctcttcccctag

SEQ ID NO: 264 - protein, 840 aa, Unknown
  Obtained from environmental sample
MKRLPILTILAIFVFSILPLSATRTIGVTTLKVQYRAADTSAGDNQIKPHLNVVNTTTSSVPLSELKIRYWYTVDGDKPQNYWCDYATVGCANITARFVKLTTPVAGVADYYLEVGFTGGTLAAGGSTGEIQNRFAKNDWTNYNETGDYSFDPTKTAFADWSRVTLYRNGTLIWGTEPGGTQPSPSPSPSPSPSPSPSPSPSPTPPPNDAYTARFLELYNEIHDPANGYFSPEGVPYHSIETLIVEAPDHGHETTSEAYSYWIWLEAMYGRVTGNWQPLANAWANMERYIIPTTQDQPTNGFYNPSRPATYASEYDTPNQYPSQLQTGVSVGVDPIGNELKSAYGTSDVYGMHWLLDVDNWYGFGSRGNGTTRPSYINTFQRGPQESVWETVPHPSWDAFNFGGPNGFLDLFTRDGSYARQWRYTNAPDADARAIQALYWAKVWADQQGGSPIVNGLVAKAAKMGDYLRYSMFDKYFKRIGCTSTSCPAGTGYDSAHYLLSWYYAWGGAADPSAGWAWRIGSSHNHFGYQNPFAAWVLSNNAAFKPASPNAARDWGTSLQRQIEFYRWLQSADGAIAGGATNSWQGAYAAPPAGTTTFYSMAYDEKPVYHDPASNTWFGFQAWSMERVAEYYYATNDAKAKLILDKWVAWARANTRLNADGTYAIPSTLSWSGKPGLSWNATTQNWNAADATYNANLRVTIVDTTQDVGITAALAKTLMYYAARSGDTASKTLAKELIDRMWTKYRDPKGVSIVETRAGYNRFDDQILVPTGWTGRMPNGDPINSTSTFLSIRSKYASDPDFAKVQSYLNGGPAPTFRYHRFWAQTDIALANAEYSRLFP

SEQ ID NO: 265 - DNA, 933 bp, Unknown
  Obtained from environmental sample
atgcgcaaactctctttattaacggcaagcctgatattttgggcgatattttccatttcctgcgatgacaattcccctaaatgtggcaaaactactccgtttgaccccgaaaagcaattctgttttgcaaatagtacggtgcacgataaatgcggcggtaaggtgtatgacccttcaaagaaattctgcagctcaaacgaggcttacagcaaatgcggtggaaaggagtatgatccagcggaacaattctgtattcgtgacgaagttcagaaaaaatgcggcggaaatggatacgaccctttggagaaattctgcactgcgaaaggcgagcttcgcgataaatgcggcaatgatggatatgactctgagaagcaattctgttctgccgatagcgtagtttatgataaatgcaatggcagcgaatacgacactggaaaactgttctgtgattccagagacaataaaacttacaaacatattaaaataggtgagtcggtttggatggcggagaatttgaattatgaagcaaaaaattcttcgtgttatgataacaaaccagcaaactgcaccaaatatggcaggctttacgattggaatacggctgcaaaagcttgtccgcgaggttggcatttgccaagcggcaaggaatgggatgctttagctagtgccgatgtagcaggcaagaaattgaaagctaagaaaggctggaacagttttccaaaaatatctggaacagatgcttttggttttgcagccttaccgggcggctatctccagaaaaataaattcctagatgccggcaaagagggcaaatggtgggaagcgagcaaaaaaggcgatttgcggtctctaaaatacaacagtgataaaggaacccaagactcaaatcgcaataaattcggtagccactctgttcgttgcgtgaggaattag

SEQ ID NO: 266 - protein, 310 aa, Unknown
  Obtained from environmental sample
MRKLSLLTASLIFWAIFSISCDDNSPKCGKTTPFDPEKQFCFANSTVHDKCGGKVYDPSKKFCSSNEAYSKCGGKEYDPAEQFCIRDEVQKKCGGNGYDPLEKFCTAKGELRDKCGNDGYDSEKQFCSADSVVYDKCNGSEYDTGKLFCDSRDNKTYKHIKIGESVWMAENLNYEAKNSSCYDNKPANCTKYGRLYDWNTAAKACPRGWHLPSGKEWDALASADVAGKKLKAKKGWNSFPKISGTDAFGFAALPGGYLQKNKFLDAGKEGKWWEASKKGDLRSLKYNSDKGTQDSNRNKFGSHSVRCVRN

SEQ ID NO: 267 - DNA, 1422 bp, Unknown
  Fungal DNA
atgcagcgcatttcaggcttggcagcagccctcctcctggcgaacatcgccagtgcccagcaaacggtctggggccaatgcggcggcattggatggtccggaccatcggcttgtgttgcatcggcaacttgcagcactcagaacccctactacgcgcagtgtctcccagcaactgcggcaaccacgaccaccacctcggctcagacgactactactacctccaagactactctgacgaccaccactgtcaccagcaccaccaccagtggcaacagccagaccaccaccaccaagacctccaccaccaccaccaagacgtccaccaccacagcaccggctagcagtggcaaccccttcagtggctaccagctctatgccaacccttactactcgtccgaggtgttcagcctcgccatcccatccctgagcagctctctggcggccaaggctagtgccgtggctaaggtcccctctttcgtttggctcgacacggctgccaaggtccctaccatgggaacttaccttgccgacatccagtccaagaatgccgccggtgctagcccgccaattgccggtatctttgtcgtctatgacttgccagaccgtgactgtgccgcccttgccagcaacggcgagtactccattgccaacaacggtgttgcgaactacaaggcgtacattgactcaatccgcgctcagcttgtcaagtactctaatgtgcacactatcttggttgtcgagcccgacagtctcgccaacctggttaccaacctgaacgtggccaagtgcgctaacgctcagagcgcctacctggagtgcatcaactacgcccttatccagctcaacttgcccaacgtggccatgtacctcgacgctgggcacgctggttggctgggctggtccgctaatctccaacccgccgctactctcttcgccaacgtctacaagaacgcctcctctcccgccgccgtgcgcggtctggccactaacgttgccaactataacgcctggagcatctccacctgcccctcgtacacccagggtgactccaactgcgacgagaaacgttacgtcaatgccattgctcctctcctccagtccgccggcttcaacgcccacttcatcactgatacttcccgcaacggtgtccagcccaccaagcagaatgcctggggtgactggtgcaacgtcatcggaactggcttcggtgtccgcgctaccaccgatactggcgatgctcttgaggatgcgttcgtctgggtcaagcccggtggtgaatgcgacggtacctcggacacttcctcagcccgctatgatgcccactgtggatacagtgatgccctgcagcctgctcctgaggccggaacctggttccaggcctacttcgagcagctccttgtcaacgccaacccgtctttctaa

SEQ ID NO: 268 - protein, 473 aa, Unknown
  Fungal protein
MQRISGLAAALLLANIASAQQTVWGQCGGIGWSGPSACVASATCSTQNPYYAQCLPATAATTTTTSAQTTTTTSKTTLTTTTVTSTTTSGNSQTTTTKTSTTTTKTSTTTAPASSGNPFSGYQLYANPYYSSEVFSLAIPSLSSSLAAKASAVAKVPSFVWLDTAAKVPTMGTYLADIQSKNAAGASPPIAGIFVVYDLPDRDCAALASNGEYSIANNGVANYKAYIDSIRAQLVKYSNVHTILVVEPDSLANLVTNLNVAKCANAQSAYLECINYALIQLNLPNVAMYLDAGHAGWLGWSANLQPAATLFANVYKNASSPAAVRGLATNVANYNAWSISTCPSYTQGDSNCDEKRYVNAIAPLLQSAGFNAHFITDTSRNGVQPTKQNAWGDWCNVIGTGFGVRATTDTGDALEDAFVWVKPGGECDGTSDTSSARYDAHCGYSDALQPAPEAGTWFQAYFEQLLVNANPSF

SEQ ID NO: 269 - DNA, 1032 bp, Unknown
  Obtained from environmental sample
  misc_feature (1)..(1032): n is a, c, g, or t
atgataaatatgcctttttcacgaggttttaatttttccaagtggtttgaagcgcggacttttcaggatattgtttttaccaaattttcggaacaggactttattaacataaaaagccttggagcggatgtcgtacgcgtccctatcgcgttccataactttacccttgaggataaggcttatacgcttgaaaaaggccttttagaataccttgataaggctgtggattgggcggaaaaacatgaattgaacgtcatccttgacaaccattccttccaccctattaatccaaccgacgacggcatcgacaggattcttctgcctgtcnggaaacagacggcggaacattttaaggacagaagcgattatgttatttatgaaatcctgaacgagccgcacggaatccccgatgatcgatggagcgaaatccaggaggcggcaatagacacgatacgcaaggttgatcaaaaacatacgattattgtcggagggacaaattataattcgctggttaaaatgacaaaagttcctgtttataaggataaaaatcttatctatacatttcacttttatgatcctcatatttttacgcatcagggcgcgacatggaacaagccgtctctggcgcccttatccgatcttccgtttccgtttgataaaaacaagatgcccaagcctcatgaaacatttgtcggaacatgggtggaagcctcgcttaactcttacgaagaggattcaaaattggaaaaattaagctctgcgctggataaggctgaaaagttttccaaagaaaggaacattcccgttttttgcggcgagttcggcgtgtttatgaagcagagcccgcatgaagaccgcgtcaaatggtataagtttatctgcggtgagcttgaaaaaagaaatatcccgtgggcatgctgggattatttcggcggtttcggtattttcaaaacggaaaaaagaggggatttcccttccgatttggatattgatgtggttaacgccataggatttaaggttaaaaatcaatga

SEQ ID NO: 270 - protein, 343 aa, Unknown
  Obtained from environmental sample
  misc_feature (1)..(343): Xaa is any amino acid
  DOMAIN (13)...(314): Cellulase (glycosyl hydrolase family 5)
MINMPFSRGFNFSKWFEARTFQDIVFTKFSEQDFINIKSLGADVVRVPIAFHNFTLEDKAYTLEKGLLEYLDKAVDWAEKHELNVILDNHSFHPINPTDDGIDRILLPVXKQTAEHFKDRSDYVIYEILNEPHGIPDDRWSEIQEAAIDTIRKVDQKHTIIVGGTNYNSLVKMTKVPVYKDKNLIYTFHFYDPHIFTHQGATWNKPSLAPLSDLPFPFDKNKMPKPHETFVGTWVEASLNSYEEDSKLEKLSSALDKAEKFSKERNIPVFCGEFGVFMKQSPHEDRVKWYKFICGELEKRNIPWACWDYFGGFGIFKTEKRGDFPSDLDIDVVNAIGFKVKNQ

SEQ ID NO: 271 - DNA, 1704 bp, Unknown
  Obtained from environmental sample
atgaagaaaataatatttctttttgccgccgtctttatttttagctgtacttcttcagaacccgtaaaaactgacaatgaagctgattattcggaagacaatgcagaagaagtgaatattactcttcctttttccaagggagtgaatttttcaaactggtttgagtccgccggcgctgacgcaatacagtttacaaggtatgttgaacatgattttgcgaacgcgaaaagccttggagtggaagtgataaggctgcctgtaaggatgcacagcatgacaagcggctctcccgattatacggttgatccgctgttgtttaaatttcttgatatggctgtaagttgggcggaaaagtacgggatatatataataatcgacaatcattcgtttgattcggttaaaaatacggagaatgacatagacaaaattttaattcctgtatgggaacagtttgcgaggcgttacaaggatcgaagcgattatgtgctttatgaaattttaaacgaaccgcacggcatcagcgacgcaagatggggagaaatacagggaagggccataaacgcaatccgaaaatatgacaccaaacattttattgtcgcgggcggcactgaatacaattccattaataaattgtccgctattcctaaatacgcggattcaaaaattatctatactttccatttttatgatccgtttctttttacacatcagggagctggctggacagggactccggtattgacaaatcttgcgggagttccctttccgtacgacagcaaacgcaggccgaaaatcccttcggatttaagagggacatgggtggaaaattctttgaataatgaatacaaaaaagcgtccgatccaaagacgctttacaataccttaaacaaagcggtttctttttccaaagagcgcaatgttccggtttattgcggagaattcggagtgttcatgattaacagttttaatgaagatcgcgtaaggtggtacaggatagttacagccgcgcttgccaaaagaaatatttcaagaacaagctgggattattacggcggtttcggactgtttaatacggacggcaagagggatttttatgaggatatgaatacggatgtcgcgcgcgcaatggggtttacgccgcctgctcaaagcccgcgcaagtatgagccgttaaataaaagttttacaatttatgatgattatccggcgggagagattacctgcggatattgggatgaaaagactgattttagtttatatgataccaatgccgcgcagggagagtatgcaataagatggggtaacgcttcgcgttataatattttttattttgcttttgacaggggcggaaatttcagtgaaattgcaaataacggttttattgaatttaaagctcgtacgggaaaatcggtcctttttgacatccgctttgtaaatcctgaaaacgcgtcttccataccgtggcgaatgcgttacacgattaatgataaaatacttccgccggacggcaagtggcacacaatccgtataccgcttaataaaatggaagatatgggagcgtggttaagtacaacgcaaaaatggctgtcttcgcagaataaattttcatggagcaacataaaacaactggaaattgtcgctgaacaaggagatatgaaggatgtttacgtctggtttgatgatataaaaataattgtaccatga

SEQ ID NO: 272 - protein, 567 aa, Unknown
  Obtained from environmental sample
MKKIIFLFAAVFIFSCTSSEPVKTDNEADYSEDNAEEVNITLPFSKGVNFSNWFESAGADAIQFTRYVEHDFANAKSLGVEVIRLPVRMHSMTSGSPDYTVDPLLFKFLDMAVSWAEKYGIYIIIDNHSFDSVKNTENDIDKILIPVWEQFARRYKDRSDYVLYEILNEPHGISDARWGEIQGRAINAIRKYDTKHFIVAGGTEYNSINKLSAIPKYADSKIIYTFHFYDPFLFTHQGAGWTGTPVLTNLAGVPFPYDSKRRPKIPSDLRGTWVENSLNNEYKKASDPKTLYNTLNKAVSFSKERNVPVYCGEFGVFMINSFNEDRVRWYRIVTAALAKRNISRTSWDYYGGFGLFNTDGKRDFYEDMNTDVARAMGFTPPAQSPRKYEPLNKSFTIYDDYPAGEITCGYWDEKTDFSLYDTNAAQGEYAIRWGNASRYNIFYFAFDRGGNFSEIANNGFIEFKARTGKSVLFDIRFVNPENASSIPWRMRYTINDKILPPDGKWHTIRIPLNKMEDMGAWLSTTQKWLSSQNKFSWSNIKQLEIVAEQGDMKDVYVWFDDIKIIVP

SEQ ID NO: 273 - DNA, 1977 bp, Unknown
  Obtained from environmental sample
gtgggaaaaataaaagcgtttgcggctgtcgccgcgctgtcgctagcggttgcgggcaatctttgggcccaagcccccgccggaagcccggtggcggagcacggggcgctcaaagtggatgggagcatggtgttggacaaaaacaacgagccggtgcagttgcggggaatgagcttgtattggactcttgaggaaaacgcgaggaagtactacaacgcgaatgtcgtcaggtcgctgtggagcgaatggaaagggaacgtgatcagggcggcgatgggcgtcggcgggtgcaaagggagttggaaacccgggtattcgtccgccggagacgctcacgacaaggccgttgaggatgtggtcacggcggccgtggcgaccggcatatacgtcatcatagattggcactcgcatgaggcgcacaatcaaacgtccgccgctcaggcgtttttcgagcgggtggcggcgaaatataaggacacgcctaacgtgatctttgagatatacaacgaaccgatagacataagcggatgcgaagtggactttgacaacgcgaatttcgccaagacgtggagcgataagataaaaccgtacagcgagacgatagtcagcgccataaggaataagggcgccgataacctcatcatcttgggtacgccttactactgtttgttccccggaaccgccgcggccaacccggtaacggcgggcggcgggaagaacctgctgtactccttccatttttacgccgcgacgcatccggttgcgcaaagatccggcgaggtttctaaggcgatctccgccggcaaggctgttttcgtctccgagttcggcaccgtagcctccaccggcgacggtactccgaatacggccgaaaccgacaaatggttccagttcttagacagaaaccaaatcggctgggccaactggtcgttcagcaacatggggcagtcctccgccgtgttctccggcgacgcgtcgaacgggtctttttcatcgcttagcgcctccggaacatacataagcaacaaactcaagcagtacgccaccaccaccttcaccgttaccgcgacggttgacggcaaaggcaaaataacgactttcccgtcgggttcgaacggcaaattcggctacggcgtgccggtgacgcttaccgccgtcgcagacccgggttgggagttttccaactggagcggcgacgcgtcgggcaacacaaataccgtgaaactctccccgctctacgcgaacgcaagcgttaaggcggtgttcgtagagggcggcaacataatcaagaacggcaagttcaacggcaccgataactggggaaaattcggaacgttttccacaaccacggacggcggccaggggctgaaatttgataatataacggccaccgcgggcgatcccaagagcgtgtacctttatcaggaggttccgctcgtccaaaatcacaagtataagctcaccttcaaagcaaaaacgggaacgggaacgcggaagctcatagtcgcggtaaccagcaccaacacggttacggcttatatgacgccgcttgaggcgtcgctcacgacgacgatgtcgccgtacagcacggagtttacattcactagggcgagcggtaacgcgagggtgctgttccagtgcggcgatcaggccggcgcgtggtacttggacgacgtgaggcttgaggatttgggcctgtcgtcgaccgttgtccgcgacgcggtctcttcttcagtcaaaaggacgccgtggtcgctcgttaggacggccgggggcgtacagttgcgcggccctattgaggccggcgccacggcagcgttctataatacgcgcggcaaacttgtaggcagagttgcgatcgccgccgacgggcatgccgccctgagcgccggcgtcccggcgggcggttatttggtggtcgtgagggatagggcgggcgctgaggtgcacaaaacgcgcttctcgctcgtggattag

SEQ ID NO: 274 - protein, 658 aa, Unknown
  Obtained from environmental sample
MGKIKAFAAVAALSLAVAGNLWAQAPAGSPVAEHGALKVDGSMVLDKNNEPVQLRGMSLYWTLEENARKYYNANVVRSLWSEWKGNVIRAAMGVGGCKGSWKPGYSSAGDAHDKAVEDVVTAAVATGIYVIIDWHSHEAHNQTSAAQAFFERVAAKYKDTPNVIFEIYNEPIDISGCEVDFDNANFAKTWSDKIKPYSETIVSAIRNKGADNLIILGTPYYCLFPGTAAANPVTAGGGKNLLYSFHFYAATHPVAQRSGEVSKAISAGKAVFVSEFGTVASTGDGTPNTAETDKWFQFLDRNQIGWANWSFSNMGQSSAVFSGDASNGSFSSLSASGTYISNKLKQYATTTFTVTATVDGKGKITTFPSGSNGKFGYGVPVTLTAVADPGWEFSNWSGDASGNTNTVKLSPLYANASVKAVFVEGGNIIKNGKFNGTDNWGKFGTFSTTTDGGQGLKFDNITATAGDPKSVYLYQEVPLVQNHKYKLTFKAKTGTGTRKLIVAVTSTNTVTAYMTPLEASLTTTMSPYSTEFTFTRASGNARVLFQCGDQAGAWYLDDVRLEDLGLSSTVVRDAVSSSVKRTPWSLVRTAGGVQLRGPIEAGATAAFYNTRGKLVGRVAIAADGHAALSAGVPAGGYLVVVRDRAGAEVHKTRFSLVD

SEQ ID NO: 275 - DNA, 1704 bp, Unknown
  Obtained from environmental sample
  misc_feature (1)..(1704): n is a, c, g, or t
atgaagaaaataataattttatttgccgccgccgttctttttagctgtacttcttcagaaccggtaaaaaccgacaatgaagctgattattctgaagacaatgttgatgcggtgaatattttccttcctttttcaaagggagtgaatttttcaaactggtttgagtcgggcagctctaacgcaatacagtttacaaggtatgttgagaatgatttcgctaacgcgaaaagccttggggtggaagtgataaggctgcctataagaatgcacagcatgacaagcggctctcccgattatacgattgatccgctgttgtttaaatttcttgatatggctgtaagttgggcggaaaagtacgggatatatataataatcgacaatcattcgtttgatccgggtaaaaacacggaagttgacatanataaaatcttaattcctgnatgggaacagtttgcaaggcgttacaaggatcgaagtaattatgtgctttatgaaattttaaacgaaccgcacggcatcagcgacgcaagatggggagaaatacaggggatggctgtaaacgcgatccgaaaatatgataccaaacattttatcgtcgtaggcggcacggaatacaattctattaataaattgtccgcgattccgaaatacgcggatccaaaaattatctatactttccatttttatgatccgtatctttttactcatcagggcgcaaactggggcgggccgcctttattgacaaaccttgccgaggttccctttccgtatgacggcaaacgcaggcctaaaatcccttcggacttaagaggaacatgggtggaaagttctttgaataatgattacagaaaagcgtccgatccaaagacgctttacaataccttaaacaaagcggtttctttttcaagagaacgcaatgttccggttttttgcggtgaattcggagtgttcatgattaacagtctgaatgaagaccgggtaaggtggtacaggattgttacggccgcgctggacaagagaaatatttcaaggacaagctgggattattacggcggtttcgggctttttattacagacggcaagaaggatttttacgaagatatgaatacggatgtcgcgcgagcgatgggatttacgcctccggttcaaaataagcgcaagaatgagccgataaataaaggttttactatatatgatgattatccggcaagagagatttcctgcgggtattgggatgataatgttgattttagtttatatgataccaatgccgcgcagggagagtattcaataagatggggtaacgcttcacagtataatatattttattttgcttttgacacaggcggaaatttcagtgaaatagtaaataacgcatatattgaatttaaagctcgtacggaaaaatcagtcttttttgacattcgctttgttaatcctgaaagcgcgtcttccataccctggcgtatgcgttacacgattaatgacaagatactcccgccggacggcaaatggcacacaatccgtatagcgcttaacagcatggaagacatgggagcgtggttaagtacaacgcagaaatggcttccttcgcagaaaaagttttcatggagcgacattaagcagttggatattgtcgctgaacacggagacatgaagggtatatatgtctggtttgacgatataaaattacttgttccctaa

SEQ ID NO: 276 - protein, 567 aa, Unknown
  Obtained from environmental sample
  misc_feature (1)..(567): Xaa is any amino acid
MKKIIILFAAAVLFSCTSSEPVKTDNEADYSEDNVDAVNIFLPFSKGVNFSNWFESGSSNAIQFTRYVENDFANAKSLGVEVIRLPIRMHSMTSGSPDYTIDPLLFKFLDMAVSWAEKYGIYIIIDNHSFDPGKNTEVDIXKILIPXWEQFARRYKDRSNYVLYEILNEPHGISDARWGEIQGMAVNAIRKYDTKHFIVVGGTEYNSINKLSAIPKYADPKIIYTFHFYDPYLFTHQGANWGGPPLLTNLAEVPFPYDGKRRPKIPSDLRGTWVESSLNNDYRKASDPKTLYNTLNKAVSFSRERNVPVFCGEFGVFMINSLNEDRVRWYRIVTAALDKRNISRTSWDYYGGFGLFITDGKKDFYEDMNTDVARAMGFTPPVQNKRKNEPINKGFTIYDDYPAREISCGYWDDNVDFSLYDTNAAQGEYSIRWGNASQYNIFYFAFDTGGNFSEIVNNAYIEFKARTEKSVFFDIRFVNPESASSIPWRMRYTINDKILPPDGKWHTIRIALNSMEDMGAWLSTTQKWLPSQKKFSWSDIKQLDIVAEHGDMKGIYVWFDDIKLLVP

SEQ ID NO: 277 - DNA, 921 bp, Unknown
  Obtained from environmental sample
atgaccatgattacgccaagctatttaggtgagactatagaatactcaagcttgcatgcctgcaggtcgactctagaggatcccacaggccttttagaataccttgataaggctgtggattgggcggaaaaacatgaattgtgcgtcatccttgacaaccattccttccaccctattaaccctaccgacgacggcatagacaggattcttctgcctgtctgggaacagacggcgaaacattttaaggccaaaagcgattatgttatttatgaaatcctgaacgagccgcacggcattcccgacgggcgctggagcgaaatccaggaggcggtaattgacgttatacgtaaggttgatcaaaaacatacgattattgtcggagggacaaactataattcgcttgaaaaaatgacaaaagttccggcttataaggataaaaatcttatctatacatttcacttttacgatcctcatatttttacgcatcagggggcgacatggaacaagccgtctctggcgcctttatccggccttcctttcccctttgataaaaacaagatgccgaaaccgcatgaaacatttatcggaacatgggtggaggcctcgcttaactcttacgaagaggattctaaattaacaaaattaagctctacgctggataaggcggaaaaattttccaaagaaaggaacattcccgttttttgcggggagttcggcgtgtttatgaagcagagtcctcatgaagaccgcgtcagatggtataagtttatctgcggtgagcttgaaaaaagaaatatcccgtgggcatgctgggattatttcggaggttttggaattttcaaaactgaaaaaagaggaaatttccctgaggatttggatattgacgtggttaacgccattggattaatggtaaaagagtga

SEQ ID NO: 278 - protein, 306 aa, Unknown
  Obtained from environmental sample
  DOMAIN (1)...(278): Cellulase (glycosyl hydrolase family 5)
MTMITPSYLGETIEYSSLHACRSTLEDPTGLLEYLDKAVDWAEKHELCVILDNHSFHPINPTDDGIDRILLPVWEQTAKHFKAKSDYVIYEILNEPHGIPDGRWSEIQEAVIDVIRKVDQKHTIIVGGTNYNSLEKMTKVPAYKDKNLIYTFHFYDPHIFTHQGATWNKPSLAPLSGLPFPFDKNKMPKPHETFIGTWVEASLNSYEEDSKLTKLSSTLDKAEKFSKERNIPVFCGEFGVFMKQSPHEDRVRWYKFICGELEKRNIPWACWDYFGGFGIFKTEKRGNFPEDLDIDVVNAIGLMVKE

SEQ ID NO: 279 - DNA, 1692 bp, Unknown
  Obtained from environmental sample
atgaagaaaatttttattttattcgccgccgccgttcttgcaggctgcagcacttcagaaaccgccgcggttgatttttctgaaggcgaagttaacgcggtgattcgttcaactcctttttcaaaaggggtaaatttttcaggatggtttgaatcaggccgggccgaggcaataccgtttaccaaatataatgagcgggatttcgcgaatgtaaaaagcatgggagcggacgtgatacggcttcccatccgtatgcacagcatgacaggcggctctcccgattatacggttgatccgcttttgtttaaatttctggatatggctgtaaattgggcggaaaagtacgggatatatatcataatagacaaccattcgtttgatcctgtaaaaaatacggaaaacaatatcgacaaaatcttaatccctgtttgggagcaggttgcgagccgttataaagatcgaagcgattatgtaatttatgaaatattaaacgaacctcatgggataagcgattcaagatggggagaagtacaggggctggcaataaacgctatacgaaggcatgacactaagcattttattattgttggcggtactgaatacaattctatcgggaaactttcttcaattcccgcttataaagacgataaaatcatctatacttttcatttttatgatccgtatctttttacccatcagggcgctagttggggcgggccgcctttattgacaactcttgccggagttccctttccgtacgacggcaagcgtatgcctaaagtatcttcacaactaaggggaacatggatagaaagctctttgaaaaatgattacaaaagggcgtcagatcccaagacgctttacagcgcattggacaaggcggtgtctttttcaagagagcgcaatatccctgttttttgcggcgaattcggcgtgtatatgattaacagcctgaacgaagatcgtgtcaggtggtacgagatcgttactgcagctcttgcaaagcgtaatatttccagggccagttgggactattacggaggtttcggcgtctttaattccgagagcggcggggattttaacgcggatttgaataccgagatggtacgcgcaatgggttttacgccgcctgttcagaccccgcgtaagcatgaaccgttaaaaaacagcataacaatttatggcgattatcctgacagggaaatttcatgcggttattgggacgagacaactgattttagtttatatgatgccaatgccgccgcgggggaattttctataagatggggaaacgccaaacaatataatattttttattttgcgtttaacaatggcgttaatttaagcgaaatcgcggataaaggaattcttgaattaaaagcgcgcgctgataagcctgttaattttgacatacgctttataaatcctgaaaacacttcttcggctccgtggcggatgagttatacgataaatgaaaagaatcttccgcccgacggcaggtggcacacaatccgtataccatttaacggtatgaaagaaacgggagcatgggttagcgcaacgcagaaatggatgccttcgcagaataaattttcatggaataatataaagcagttggaaattgtcgctgaacacggagatatgaagggtatttgcgtctggtttgatgatataaaaataattgtaccatga

SEQ ID NO: 280 - protein, 563 aa, Unknown
  Obtained from environmental sample
  SIGNAL (1)...(22)
MKKIFILFAAAVLAGCSTSETAAVDFSEGEVNAVIRSTPFSKGVNFSGWFESGRAEAIPFTKYNERDFANVKSMGADVIRLPIRMHSMTGGSPDYTVDPLLFKFLDMAVNWAEKYGIYIIIDNHSFDPVKNTENNIDKILIPVWEQVASRYKDRSDYVIYEILNEPHGISDSRWGEVQGLAINAIRRHDTKHFIIVGGTEYNSIGKLSSIPAYKDDKIIYTFHFYDPYLFTHQGASWGGPPLLTTLAGVPFPYDGKRMPKVSSQLRGTWIESSLKNDYKRASDPKTLYSALDKAVSFSRERNIPVFCGEFGVYMINSLNEDRVRWYEIVTAALAKRNISRASWDYYGGFGVFNSESGGDFNADLNTEMVRAMGFTPPVQTPRKHEPLKNSITIYGDYPDREISCGYWDETTDFSLYDANAAAGEFSIRWGNAKQYNIFYFAFNNGVNLSEIADKGILELKARADKPVNFDIRFINPENTSSAPWRMSYTINEKNLPPDGRWHTIRIPFNGMKETGAWVSATQKWMPSQNKFSWNNIKQLEIVAEHGDMKGICVWFDDIKIIVP

SEQ ID NO: 281 - DNA, 1407 bp, Unknown
  Fungal DNA
atgactgtctatcaactcttgtttacggccgctttggctggtacagcacttgctgcccctcttgtcgaggaacgccaggcttgcgccagccagtgggcccagtgtggtggcttcagctggaatggtgctacttgctgccagtctggtagttactgtagcaagatcaatgactattactctcagtgtattcctggagagggtcccgccacttccaagacaagcacgcttcctgcttctaccaccaccagcaagccgacttccacttccactgctggtacttcttccactacgaagcctccacctgctggaagcggcactgccacttatagcggaaacccctactctggtgttaacctttgggccaacagctactatcgctcagaggttaccaacttggccatccccaagttgagcggtgccatggccacggctgctgccaaggtcgctgatgttccctcttatcagtggatggactctttcgagcacatctccctgatggaggatactcttgttgacattcgaaaggccaaccaggctggtggtaactacgccggccagtttgtcgtctatgatctccctgatcgtgactgcgctgctgccgcttccaacggagagtattcccttgacaaggatggtgccaacaagtacaagaactacatcaacactatcaagaagatcatccagagctactctgatatccgaatcctccttgttattgagcctgactccctggctaacctggtcaccaacatggatgttgccaagtgcgccaaggcccatgatgcgtacatcagcctgacgaactacgctgtcacggaactgaacctacccaacgtcgccatgtatcttgatgcaggccacgctggctggctcggctggcccaacaaccaaggccctgctgcgaagctctttgctagcatctacaaggatgccggcaagccagctgcgctccgtggactcgccaccaacgttgctaactacaacgcctggagcctcagcagtgctcccccttatacccaaggcgcctccatctacgacgagaagagtttcattcacgcaatgggtcctctcctggagcagaatggctggcctggcgctcacttcattaccgaccagggccgttctggcaagcagcccaccggccagatccagtggggtgactggtgcaactccaaaggcactggctttggtatccgtccctctgccaacactggtgacagcctcctcgatgcttttgtctgggtcaagcctggtggtgagtctgatggtacctcggacacgagtgctacccgttacgactaccactgcggtgcttctgccgctcttcagccggcacctgaggcaggaacctggttccaggcctacttcgagcagcttcttaccaatgccaacccttcgttcctgtaa

SEQ ID NO: 282 - protein, 468 aa, Unknown
  Fungal protein
MTVYQLLFTAALAGTALAAPLVEERQACASQWAQCGGFSWNGATCCQSGSYCSKINDYYSQCIPGEGPATSKTSTLPASTTTSKPTSTSTAGTSSTTKPPPAGSGTATYSGNPYSGVNLWANSYYRSEVTNLAIPKLSGAMATAAAKVADVPSYQWMDSFEHISLMEDTLVDIRKANQAGGNYAGQFVVYDLPDRDCAAAASNGEYSLDKDGANKYKNYINTIKKIIQSYSDIRILLVIEPDSLANLVTNMDVAKCAKAHDAYISLTNYAVTELNLPNVAMYLDAGHAGWLGWPNNQGPAAKLFASIYKDAGKPAALRGLATNVANYNAWSLSSAPPYTQGASIYDEKSFIHAMGPLLEQNGWPGAHFITDQGRSGKQPTGQIQWGDWCNSKGTGFGIRPSANTGDSLLDAFVWVKPGGESDGTSDTSATRYDYHCGASAALQPAPEAGTWFQAYFEQLLTNANPSFL

SEQ ID NO: 283 - DNA, 1887 bp, Unknown
  Obtained from environmental sample
gtggcggagcacggggcgctcaaagtggatgggagcatggtgttggacaaaaacaacgagccggtgcagttgcggggaatgagcttgtattggactcttgaggaaaacgcgaggaggtactacaacgcgaatgtcgtcaggtcgctgtggagcgaatggaaagggaacgtgatcagggcggcgatgggcgtcggcgggtgcaaagggagttggaaacccgggtattcgtccgccggagacgctcacgacaaggccgtcgaggatgtggtcacggcggccgtggcgaccggcatatacgtcatcatagattggcactcgcatgaggcgcacaatcaaacgtccgccgctcaggcgtttttcgagcgggtggcggcgaaatataaggacacgcctaacgtgatctttgagatatacaacgaaccgatagacataagcggatgcgaagtggactttgacaacgcgaatttcgccaagacgtggagcgataagataaaaccgtacagcgagacgatagtcagcgccataaggaataagggcgccgataacctcatcatcttgggtacgccttactactgtttgttccccggaaccgccgcggccaacccggtaacggcgggcggcgggaagaacctgctgtactccttccatttttacgccgcgacgcatccggttgcgcaaagatccggcgaggtttctaaggcgatctccgccggcaaggctgttttcgtctccgagttcggcaccgtagcctccaccggcgacggtactccgaatacggccgaaaccgacaaatggttccagttcttagacagaaaccaaatcggctgggccaactggtcgttcagcaacatggggcagtcctccgccgtgttctccggcgacgcgtcgaacgggtctttttcatcgcttagcgcctccggaacatacataagcaacaaactcaagcagtacgccaccaccaccttcaccgttaccgcgacggttgacggcaaaggcaaaataacgactttcccgtcgggttcgaacggcaaattcggctacggcgtgccggtgacgcttaccgccgtcgcagacccgggttgggagttttccaactggagcggcgacgcgtcgggcaacacaaataccgtgaaactctccccgctctacgcgaacgcaagcgttaaggcggtgttcgtagagggcggcaacataatcaagaacggcaagttcaacggcaccgataactggggaaaattcggaacgttttccacaaccacggacggcggccaggggctgaaatttgataatataacggccaccgcgggcgatcccaagagcgtgtacctttatcaggaggttccgctcgtccaaaatcacaagtataagctcaccttcaaagccaaaacgggaacgggaacgcggaagctcatagtcgcggtaaccagcaccaacacggttacggcttatatgacgccgcttgaggcgtcgctcactacgacgatgtcgccgtacagcacggagtttacattcactagggcgagcggtaacgcgagggtgctgttccagtgcggcgatcaggccggcgcgtggtacttggacgacgtgaggcttgaggatttgggcctgtcgtcgaccgttgtccgcgacgcggtctcttcttcagtcaaaaggacgccgtggtcgctcgttaggacggccgggggcgtacagttgcgcggccctattgaggccggcgccacggcagcgttctataatacgcgcggcaaacttgtaggcagagttgcgatcgccgccgacgggcatgccgccctgagcgccggcgtcccggcgggcggttatttggtggtcgtgagggatagggcgggcgctgaggtgcacaaaacgcgcttctcgctcgtggattag

SEQ ID NO: 284 - protein, 628 aa, Unknown
  Obtained from environmental sample
  DOMAIN (12)...(289): Cellulase (glycosyl hydrolase family 5)
MAEHGALKVDGSMVLDKNNEPVQLRGMSLYWTLEENARRYYNANVVRSLWSEWKGNVIRAAMGVGGCKGSWKPGYSSAGDAHDKAVEDVVTAAVATGIYVIIDWHSHEAHNQTSAAQAFFERVAAKYKDTPNVIFEIYNEPIDISGCEVDFDNANFAKTWSDKIKPYSETIVSAIRNKGADNLIILGTPYYCLFPGTAAANPVTAGGGKNLLYSFHFYAATHPVAQRSGEVSKAISAGKAVFVSEFGTVASTGDGTPNTAETDKWFQFLDRNQIGWANWSFSNMGQSSAVFSGDASNGSFSSLSASGTYISNKLKQYATTTFTVTATVDGKGKITTFPSGSNGKFGYGVPVTLTAVADPGWEFSNWSGDASGNTNTVKLSPLYANASVKAVFVEGGNIIKNGKFNGTDNWGKFGTFSTTTDGGQGLKFDNITATAGDPKSVYLYQEVPLVQNHKYKLTFKAKTGTGTRKLIVAVTSTNTVTAYMTPLEASLTTTMSPYSTEFTFTRASGNARVLFQCGDQAGAWYLDDVRLEDLGLSSTVVRDAVSSSVKRTPWSLVRTAGGVQLRGPIEAGATAAFYNTRGKLVGRVAIAADGHAALSAGVPAGGYLVVVRDRAGAEVHKTRFSLVD

SEQ ID NO: 285 - DNA, 1017 bp, Unknown
  Obtained from environmental sample
atgcgtaaaaagagtacgctgtcgttagtcggcgcggcggtcgcgcttgtttgcgcgtccgccgccgtcgcccagacgcccgttgagaggcatgggcagctctccgtctcaggcaaccggattgtcggcaagcacggcaatccggtgcagctgcggggaatgagcctctattggagcatgggtcccggcggcagggacttctacaacgctagcgccgtgcagtacctcgccgcgaactggaaggtgagcgtgataagggccgccatgggggtggagaccaacttttggaacgaggccaaccagcagggatacatctcaaatccaaccgccaacctcgcccgcgtgaaagccgtggtagacggcgccatagcggcaggcatctacgtcataatcgattggcactcccacgaagcggaaagctacacggcgcaggccaagtcgttcttcgaggagatggcgcgtacctacggcggtaaagccaacgtcatatacgaaatatacaacgaaccgatagggacggcttcgaccaccgcggccacgtggagcaccataaagacttacgccaacgcgatagtgccggccatcagggcgatagacggcgagaacctcatcatcataggcacgccccttagctgccaataccccaacttggccgccgccgacccggtcgccggcaagaatttggcctacaccgtgcacttctacgcggcggagccgggccaccaagcggacctgcgcaaccgcacgagagacgctctcaaaaaaggcgcgccgatattcgcctcggaaatgggcacctgcgccgccagcggaaaaggcaccataaactcggcgcagacggatacatggttcaggctgctcgacgagtacggcgtgagctgggccaactggtcgataggcaccgccgatgaaaccgcctccgccctcaaatccggcgcgagcgcctccggtaattggaacgacggcaacctgacggagtccggcaaactgatccgcggtaagctcatctcgtgccga

SEQ ID NO: 286 - protein, 339 aa, Unknown
  Obtained from environmental sample
MRKKSTLSLVGAAVALVCASAAVAQTPVERHGQLSVSGNRIVGKHGNPVQLRGMSLYWSMGPGGRDFYNASAVQYLAANWKVSVIRAAMGVETNFWNEANQQGYISNPTANLARVKAVVDGAIAAGIYVIIDWHSHEAESYTAQAKSFFEEMARTYGGKANVIYEIYNEPIGTASTTAATWSTIKTYANAIVPAIRAIDGENLIIIGTPLSCQYPNLAAADPVAGKNLAYTVHFYAAEPGHQADLRNRTRDALKKGAPIFASEMGTCAASGKGTINSAQTDTWFRLLDEYGVSWANWSIGTADETASALKSGASASGNWNDGNLTESGKLIRGKLISCR

SEQ ID NO: 287 - DNA, 2823 bp, Unknown
  Obtained from environmental sample
atgacgtataacctcgattttaagcttgatagccgctggaacactggttttaccggctcaatttccttaagtaatctcaatccgagttcaatcaacggttggacgatcgagttcgatgctccgttcgagatcacaaatctctggaacgggcagatcgtcagccatgtcggcaatcactacatcattcgcaacgcagcttggaatggtacggtcggcccgaacggcactgcctcgttcgggttccaggccagctacaccggatcatcgccgcagcccaccagctacattgtcaatggccaagcggtcggcggaacccctgcgcttccgacgctggcgatcgccgatgccagtctcgctgaggggaattcagggtccaaggaggctttggtcaccgtctccctctccagcgcctcgaccgaggccgttaccttcaactacgccacagcgaatggcacggcccaggcgggtactgactatgtggcgaagtccggcacgctgacctttgctcccggcgagaccagcaagacgatcgcgatttcggtcaccggtgacacggccgtcgagaccaccgaggccttcgtcgtgaacctgacatccccaacgaaggcaactatcgccgacggacagagcacgatcacgatcaccaatgacgatgccgccgcacccggggcgtccctgcgtgtgtccgatgtcagcattacggaggggcagagtggcacgtcgaatgcgacattcacggtgactctatcggctgcagccaccgcgcccgtcaccgtatcctacgccactgccgacggaactgcccttgcaggctctgactacacgacaaaggccggcacgctcaccttcgctccaggcgaaaccacgaagacagtggccgtgtcggtcctcggcgacatgctttcggagcagaacgaaaccttcaggttcaatctgtccggtgcatcgggagccacgatcgccaaggggcagggcacagccaccattctcaacgacgatcaggcggctcccacgccatccatcacagtggcggacatttctgtccaggagggcaatccggtcaccgtgcccggcaccggaaccggtgtcggccagggcttcttccatacgatcggcaatcagattgtggattcttctggcactggggtgacgattgccggcgtgaactggtttggcatggaatcgaaccgctatgcgccggacggtctgcaggtgcgcaactacaaagagatgatgcagcagatggcggatctggggttcaacaccatccgtctgccgttctccgaccagctgtttgacgccggcagcacgcccaacggcatcgacttcggtaagaacccggatctggccgggcttaacgggcttcagatcatggacaggatcgtggcctatgccgggcagatcggactgaagatcatcctcgatcaccaccgctcgagcgcgggggccggcgccaacgccaatggcctgtggtacgagggcgcttacaccgagcagaagtggatcgccaactggacgatgctggccgggcactatgccggcaatccgaccgtgatcggcgccgatctgcacaacgagccgcacggaccggcgacctggggcggcaatgccgcgaccgactgggccgcggcggccgagcgggccggcaacgccgtgctggccgccaacccgaactggctcatcttcgtcgagggcatcgaggcctacaacaaccagtactactggtggggcggcaacctcatgggcgtgaaggaccggccgatcgtgctcgacgtccccgggcggctggtctactcggcgcatgattatcccaactcgatctatggccagccctggttcaacgatccggcgtttcccaacaacctgccgtcgaagttcgaccagatgtggggctatatctacaagcagaacatcgccccggtgtatctaggcgagttcggcagcaagctcacggatccgaaggatctggcctggctcgacaagatcacggcctatctggggggcgatttcgacgccaatggcacgagcgacatcacttctggcaaacagggcgtgcactggacctggtggtcgtggaacccgaactccggcgacaccggtggcatcctgcaggacgactggacctccgtccaccagaacaaaatcgccgaactccagccaatcatgtttgatttcgacaccgggggcgggggctcgacgattaatggcaccaccaatgcggtcttcacggtggagctgtcctccgcatccgccacaccggtgaccgtcacctacaagaccattgcgggaactgcggccgacggcgacttcacgcctgttgcgggaacactgaccttcgcccctggggagacgaagaaggttgtcaccgtgaaggtggccggcgacgcgctccaggaagcgaacgagacattccagctcgccctatccagcccgacaggcgccaccctcgctaagccgtcagcgaccgcgacaatcctcaacgatgatggtggaaccacaacgcccccgaccacgacgcctccgtcgacctcggcgcttaaggcgacaactgtcatcaccaacgactggggaagcgggtttacagcgaatgtcaccgtgaagaataccggtacgaccgccgtcgacacctgggcgctcaagctcaaatcccccttggacatctctaacatctggaatgccacgatcgtaagccacagtgccgatacctacctgctcaacgacgcaggatggaaccgcaccatcgcacccggtcaggaagtgaccttcggctttcaggccagtcctggtcacccgtccgccacatccttcgactggattctgtga

SEQ ID NO: 288 - protein, 940 aa, Unknown
  Obtained from environmental sample
  DOMAIN (3)...(102): Cellulose binding domain
MTYNLDFKLDSRWNTGFTGSISLSNLNPSSINGWTIEFDAPFEITNLWNGQIVSHVGNHYIIRNAAWNGTVGPNGTASFGFQASYTGSSPQPTSYIVNGQAVGGTPALPTLAIADASLAEGNSGSKEALVTVSLSSASTEAVTFNYATANGTAQAGTDYVAKSGTLTFAPGETSKTIAISVTGDTAVETTEAFVVNLTSPTKATIADGQSTITITNDDAAAPGASLRVSDVSITEGQSGTSNATFTVTLSAAATAPVTVSYATADGTALAGSDYTTKAGTLTFAPGETTKTVAVSVLGDMLSEQNETFRFNLSGASGATIAKGQGTATILNDDQAAPTPSITVADISVQEGNPVTVPGTGTGVGQGFFHTIGNQIVDSSGTGVTIAGVNWFGMESNRYAPDGLQVRNYKEMMQQMADLGFNTIRLPFSDQLFDAGSTPNGIDFGKNPDLAGLNGLQIMDRIVAYAGQIGLKIILDHHRSSAGAGANANGLWYEGAYTEQKWIANWTMLAGHYAGNPTVIGADLHNEPHGPATWGGNAATDWAAAAERAGNAVLAANPNWLIFVEGIEAYNNQYYWWGGNLMGVKDRPIVLDVPGRLVYSAHDYPNSIYGQPWFNDPAFPNNLPSKFDQMWGYIYKQNIAPVYLGEFGSKLTDPKDLAWLDKITAYLGGDFDANGTSDITSGKQGVHWTWWSWNPNSGDTGGILQDDWTSVHQNKIAELQPIMFDFDTGGGGSTINGTTNAVFTVELSSASATPVTVTYKTIAGTAADGDFTPVAGTLTFAPGETKKVVTVKVAGDALQEANETFQLALSSPTGATLAKPSATATILNDDGGTTTPPTTTPPSTSALKATTVITNDWGSGFTANVTVKNTGTTAVDTWALKLKSPLDISNIWNATIVSHSADTYLLNDAGWNRTIAPGQEVTFGFQASPGHPSATSFDWIL

SEQ ID NO: 289 - DNA, 1704 bp, Unknown
  Obtained from environmental sample
gtgaagaagatattaattttattcgccgctgccgttcttttttactgtacttcttcagaaccgaaaaaaactgccaatgaagctgattattcggaagacaatgttgacgctgtgaatatttctcttcctttttcaaaaggggtgaattttagcggatggtttgagtccggcagagctaatgcgataccgtttacaaagtatgttgagcatgattttgcgaatgtaaaaagccttggggtggaagttataaggcttcctataaaaatgcacagcatgacaagcgggtctcccgattatacgattgatccgctgttatttaaatttattgatatggctgtaagttgggcggaaaagtacggcatatatataataattgataatcattcgtttgattcgattaaaaatactgaagatgacatagacaaaattttaattcctgtatgggaacagtttgcaaagcgttacaaagatcgaagtaattatgtgctttatgaaattttaaacgaaccgcacggcatcagcgacgcaaaatggggagaaatacaggggagggctataaacgcaatccgaaaatatgacaccaaacattttattgtcgtaggcggcacggaatacaattccatttataaattgtccgcaattccaaaatacgcggattcaaaaattatatatactttccatttttatgatccgtttctttttacacatcagggcgccggttggacaggaactccggtattaacaaatcttgctaaagtcacatttccgtatgacagcaagcgcatgccgaaaatcccttcggacttaaaaggaacatgggtggaaagatctttgaataatgattataaaacggcatccgatccaaagacgctttacaataccttaaacaaagcggtttctttttccagagaacgcgatgttcctgttttttgcggagaattcggagtgttcatgattaacagtttgaatgaagatcgcgtaaggtggtacagaattgttacagccgcgcttgacaagagaaatattccaaggacaagctgggattattacggcggttttggactgtttaatacggacggaaagagggattattacgaagatatgaatacggatgtcgcgcgcgcaatgggatttacgccgcctgttcaaagcctgcgcaagtatgagccgttaaataaaagttttacaatttatgatgattatccggcaagagaaattacctgcggatattgggatgaaaatgttgattttagtttatatgataccgacgccgcgcagggagagtattcaataagatggggtaacgcttctcggtataacactttttattttacttttgacaggggtggaaatttcaatgaaattgtaaataacgcgtttattgaatttaaggcacgtacggaaaaatcagtcctttttgacattcgctttattaatcctgaaaacgagtcttccataccgtggcgcatgcgttacacgattaatgacaagatacttccgccggacggcaagtggcacacaatccgcgtcccgtttaacggtatggaagacatgggagcgtggttaagttcgacgcaaaaatggcttccttcgcagaataaattctcatggaacaacataaaacagctggaaattgtcgctgaacacacagatatgaatggtttatatgtctggtttgataatataaaattaattgttccctaa

SEQ ID NO: 290 - protein, 567 aa, Unknown
  Obtained from environmental sample
MKKILILFAAAVLFYCTSSEPKKTANEADYSEDNVDAVNISLPFSKGVNFSGWFESGRANAIPFTKYVEHDFANVKSLGVEVIRLPIKMHSMTSGSPDYTIDPLLFKFIDMAVSWAEKYGIYIIIDNHSFDSIKNTEDDIDKILIPVWEQFAKRYKDRSNYVLYEILNEPHGISDAKWGEIQGRAINAIRKYDTKHFIVVGGTEYNSIYKLSAIPKYADSKIIYTFHFYDPFLFTHQGAGWTGTPVLTNLAKVTFPYDSKRMPKIPSDLKGTWVERSLNNDYKTASDPKTLYNTLNKAVSFSRERDVPVFCGEFGVFMINSLNEDRVRWYRIVTAALDKRNIPRTSWDYYGGFGLFNTDGKRDYYEDMNTDVARAMGFTPPVQSLRKYEPLNKSFTIYDDYPAREITCGYWDENVDFSLYDTDAAQGEYSIRWGNASRYNTFYFTFDRGGNFNEIVNNAFIEFKARTEKSVLFDIRFINPENESSIPWRMRYTINDKILPPDGKWHTIRVPFNGMEDMGAWLSSTQKWLPSQNKFSWNNIKQLEIVAEHTDMNGLYVWFDNIKLIVP

SEQ ID NO: 291 - DNA, 1638 bp, Unknown
  Obtained from environmental sample
atgagtattcattataatcaaacaggttatgggcaggaattgccgaaaaaagcggtaataacaggcaagggaaataattgcatggttcttaatgagcgggacatgggcgcgtggagcccgcaggacggcggaaagatcgtttataccttatccgaaccttcttacgacgaggcttcaggcgatactgtgcgtattctggatttttcaaatataactttgcccggcaggtatattattttttcagacggggaacaagtaacaattaatataaaagataaaccatataacgtgttatgcaatgcactgataaaaggtttgtattaccagcgctgcggatgcgaactgtctgataaacacgcgggcccttattcgcacggaacatgtcatttgggaaaagccgttcttgttaaggacaacggggagattgatccaaataccgtgatcgattgcgccggaggctggcatgatgccggagattacggacgatataccgcgcccgcggcggctacattggggcacatgctctattcctacgaattttttcccggggcttttaaggatgaacttaatatccccgaaagcggaaacggcgttcccgacattttaaatgaatgccgttacgaacttgaatggatgttaaaaatgcaaagagaagacggaggagtttatcataaagtcgcgacaaggtatttttccggttttattatgcctcaggatgataaagacgatctttttctttttagggtttctcattgttccaccgcgggttttgccgcgtcaacggctttggcatcaagggtttataagccctttgacgcagatttttcaaacaaacttttacaggcggctgagaaagcgtggaattggatggaagctaaccctgtttttgagccttttaacaatccgccggatttcaggtcaggaggatatggggatttttcatgcgaagacgaacttttttgggcaagcgcggaattatattcggttacgggagacaaacgctatgaagaagcgttgaaaaaacgtttttccgccgtggatttttcgggattcgggtggcgtgaaaccgcgggcttcggggttctttgctgtctttttatattaaaagataaattggatgaatctcttttttctttaataaaagaaaagtttttggaaacagcggattcaaaactcgcgcttgccatgaaaagcggttatggtacggccctgggcgcggacagttatgtatggggaagcatactccccattcttaacaacgcaataataatgatttgcgcttgtcttttaacaaaagaaagcaaataccgcgatgccgcccttaatcaactggattatcttctgggaatgaacgccacaggttacagctttgttacaggttttggagatcgcccgtaccgtttcccgcaccacaggccttcttttgccgacggggtggatgatcccgtgccgggccttgtatcgggcggtccaaacaaacaatatcccgatatggcatgcaaaacaattataccgaaggatacgcccgccgctaaattctatattgattatacgcctacggcatcggcaaatgaaatcgcgatttattggaattctccggcggtttttgttacggcttatttttccagtttgatgtag

SEQ ID NO: 292 - protein, 545 aa, Unknown
  Obtained from environmental sample
  DOMAIN (3)...(87): N-terminal ig-like domain of cellulase
MSIHYNQTGYGQELPKKAVITGKGNNCMVLNERDMGAWSPQDGGKIVYTLSEPSYDEASGDTVRILDFSNITLPGRYIIFSDGEQVTINIKDKPYNVLCNALIKGLYYQRCGCELSDKHAGPYSHGTCHLGKAVLVKDNGEIDPNTVIDCAGGWHDAGDYGRYTAPAAATLGHMLYSYEFFPGAFKDELNIPESGNGVPDILNECRYELEWMLKMQREDGGVYHKVATRYFSGFIMPQDDKDDLFLFRVSHCSTAGFAASTALASRVYKPFDADFSNKLLQAAEKAWNWMEANPVFEPFNNPPDFRSGGYGDFSCEDELFWASAELYSVTGDKRYEEALKKRFSAVDFSGFGWRETAGFGVLCCLFILKDKLDESLFSLIKEKFLETADSKLALAMKSGYGTALGADSYVWGSILPILNNAIIMICACLLTKESKYRDAALNQLDYLLGMNATGYSFVTGFGDRPYRFPHHRPSFADGVDDPVPGLVSGGPNKQYPDMACKTIIPKDTPAAKFYIDYTPTASANEIAIYWNSPAVFVTAYFSSLM

SEQ ID NO: 293 - DNA, 1635 bp, Unknown
  Obtained from environmental sample
atgagtattcactacaaccaggtgggttatgatccacatttaccgaaaagagcgattctaaccggcaaaggcgaatgttgcatgattctgagcgagcgggagcttgacatttaccgacagactgagacgaagacctgcgaaccagcgctttccgaagcggcttacgatgaggcttcaggtgacacggtgcgggttgtggatttttccgccatctcggagccgggaaagtatttcctcatagccgacggagaaaaggttaccatcattataaaagaaaagccctaccacgaactgagcaatgccctggtgaaagggctttactatcaacgttgcggctgtgagctgccggaaaagcacgcggggaacttccgccacgcgccatgccatttgggaaaagccactctggtcaaggacaatggggaacttgacatgaatactgtgatcgactgcacagggggctggcatgatgccggggattatggccgctatatcgctcctgcggctgtggcagttgcccacatgctctactccttcgaattcttcccccaggtatatcgggatcggctggacattcctgaaagcggcaacgggttaccggacatcctcaacgaatgccggtacgaactggaatggatgctaaaaatgcagagggccgacgggggcctttaccacaaggtggctacaaagtatttcgccaaatttattatgccagaagatgacaaggacgagctctttcttttcagggttagccactgttccactgcggcctttgcagcgtcggcggcccaggcgtcccgggtttacagggcttacgacaccgcttttgccgacaggctccttggggcagcgaaaaaagcctgggactggatggaggcaaaccctgtgttcgaggctttcgttaatccgcccgattttcattccggaggatatggggattcaagttgcgaggacgaactcttctgggcttccgctgaactgtattccgtcaccggagaagattgctacctggcggctttagaaaaacgggcagctatcgttgatattgcccagtttggctggcgggaaaccgcaggcttcggaaccctctgctgtcttttcattatgaaagacaagctggacaaagacatgcttgccgcgctaaaagagaggttcctccggagcgccgattccttccttgagctagccaaaaaaagccgatatggtacggccctggctgccgacaaatatgtctggggaagtatactcccaatcctcaacaatgccatcgccctgatctgcgccggcctcctcacaggaaaagacgaatattcgaaggcagcccggaatcaactggattatcttttggggatcaacgccacgggttacagctttgtgacaggctttggagaacgggcctaccgcttcccgcaccaccggccttcttacgccgacggggtggacgatcccgtaccgggtttggtgtccggtggacccaacaaggtataccctgaccacgtagcaaaaatgactataccaccggatacgcctccggctaaattctacatcgatcatacgcccacagcctcgtccaacgaaatagccatatactggaattcgccggcggtttttgtggcagcttatttcgattcgatataa

SEQ ID NO: 294 - protein, 544 aa, Unknown
  Obtained from environmental sample
  DOMAIN (3)...(87): N-terminal ig-like domain of cellulase
MSIHYNQVGYDPHLPKRAILTGKGECCMILSERELDIYRQTETKTCEPALSEAAYDEASGDTVRVVDFSAISEPGKYFLIADGEKVTIIIKEKPYHELSNALVKGLYYQRCGCELPEKHAGNFRHAPCHLGKATLVKDNGELDMNTVIDCTGGWHDAGDYGRYIAPAAVAVAHMLYSFEFFPQVYRDRLDIPESGNGLPDILNECRYELEWMLKMQRADGGLYHKVATKYFAKFIMPEDDKDELFLFRVSHCSTAAFAASAAQASRVYRAYDTAFADRLLGAAKKAWDWMEANPVFEAFVNPPDFHSGGYGDSSCEDELFWASAELYSVTGEDCYLAALEKRAAIVDIAQFGWRETAGFGTLCCLFIMKDKLDKDMLAALKERFLRSADSFLELAKKSRYGTALAADKYVWGSILPILNNAIALICAGLLTGKDEYSKAARNQLDYLLGINATGYSFVTGFGERAYRFPHHRPSYADGVDDPVPGLVSGGPNKVYPDHVAKMTIPPDTPPAKFYIDHTPTASSNEIAIYWNSPAVFVAAYFDSI

SEQ ID NO: 295 - DNA, 1857 bp, Unknown
  Obtained from environmental sample
atgcaaaaattgtgccagttctgtatccccgtttggccggaaattcccatatatttctatattatctccatgaaacaccctttcgccttgatttttatggctaccctatcgttacttctttttacccaatgccaaaatgcacagatttcaagctccagagcaaagataaaccaaatcggctatggagaggagtctaaaaaaatcctcgtttttggcgatacagatgccaaatccgtggaattcaaggattcggcgagcggaaaaaccgttttaaccgccccattgtctgaaccaggggtttgggaatacagcggggaaatagcgcgcaaagcggatttttctgaattgaaaaagggacgatactccgcatatataaaaggggcaaaaaatccagatgatataatagtggacaacaatgcttacgaaaacgtttttaaagctgcgctaaaatggttctatttccaaagggcatcaacagccctgagcgaagaatttgctggcaaatgggctagggaagcagggcacccggataccagcgtctatttttttcccgaaagcgacaagccagcggattggaaaataagcagccccaaaggttggtatgatgccggggattacggcaaatacattgtgaatagcggaatttccgtcttcacccttttggagttttacgaacattttgaaaacgagcttaaaaatatctcctcaaacattccagagagtgggagtgcagtcccggatattttggaggaggttcgctggaacttggattggatgctcacaatgcaggacgcagacggcggagtttaccacaaactgacaacagcgcggttctgcggacatataatgcccaatttggacaccgcgagaagatatgtggttatgaaaacgaccaccgccaccttgaattttgccgctgtaatggctcaagcctcaagaatttacaaacactttgacgagcaattctcaaaaacagcattggcagcagcggaaaaagcctttgagtgggcgagcaaaaatcctggcatcttatacaaacagccggacggaatgaacaccgggcaatatcaccatccaagagaaactgcgatggacgagcgtttgtgggcagcaacggagctttatataagtacccgaaaggagctttattcaaaatccatagattttgcccatttgattcctgattcctcttctcagagcgatacgggggcagctgcaacttatccatcaaacctaaattcctctccctggtggggggatgcgaactttttggcggtttacaggctggcgaacggcaaaaacggctttgaggaaaatttaaccaaaacggcgcaaagtgctttattgtccttagcggataaacttagggacgtcgcggaaaactctgcctacggattgcccatattcaaagaaaactttgtttggggttcaaattccgtggttgcgaataatggcattgtgcttttgcacgcatattacctaacaggcgacaagcggtatcttaatgctgctcaaagggctttggattatcttttgggagccaaccctcttgacctgagttttgtgaccggatatggctacagaacgcctatgcatccgcatcaccgccagtccataggcgataccattttggagcctgtgcccggtatgctggtgggcggcccgcacgagggcgggcaggatattagacccggccaaaactgcgatgattatctacaaaaaggcaagcccgctctttcttacctagacaacgattgcagctacgcaaccaacgaggttgctataaactggaacgccccgctagtatatttgtcgggtgctttacatttcttgaacaacggagcgaagaggccgtaa

SEQ ID NO: 296 - protein, 618 aa, Unknown
  Obtained from environmental sample
MQKLCQFCIPVWPEIPIYFYIISMKHPFALIFMATLSLLLFTQCQNAQISSSRAKINQIGYGEESKKILVFGDTDAKSVEFKDSASGKTVLTAPLSEPGVWEYSGEIARKADFSELKKGRYSAYIKGAKNPDDIIVDNNAYENVFKAALKWFYFQRASTALSEEFAGKWAREAGHPDTSVYFFPESDKPADWKISSPKGWYDAGDYGKYIVNSGISVFTLLEFYEHFENELKNISSNIPESGSAVPDILEEVRWNLDWMLTMQDADGGVYHKLTTARFCGHIMPNLDTARRYVVMKTTTATLNFAAVMAQASRIYKHFDEQFSKTALAAAEKAFEWASKNPGILYKQPDGMNTGQYHHPRETAMDERLWAATELYISTRKELYSKSIDFAHLIPDSSSQSDTGAAATYPSNLNSSPWWGDANFLAVYRLANGKNGFEENLTKTAQSALLSLADKLRDVAENSAYGLPIFKENFVWGSNSVVANNGIVLLHAYYLTGDKRYLNAAQRALDYLLGANPLDLSFVTGYGYRTPMHPHHRQSIGDTILEPVPGMLVGGPHEGGQDIRPGQNCDDYLQKGKPALSYLDNDCSYATNEVAINWNAPLVYLSGALHFLNNGAKRP

SEQ ID NO: 297 - DNA, 1722 bp, Unknown
  Obtained from environmental sample
ttgattttctatattctccctatgaaaccatttctcacacttatttttatggcaacacttttaaatgcgcaaactcatggattcggggctagaataaaccaaattggctatggagaacaggctaaaaaaattttggttttaaaagatgccggagccacctctgttgaatttaaagatttagcaagcggcaaaactgtattgaatgcaccattatctgctccagcaacttgggaatatagcggagagtctgtacgcaaggcagatttttctggaattgcgaaaaaaggagtttatgccgcttatgtaaacggaaccagaatttctgacaatataattgtgcaaaacaatgtttacgaaaatgtgttcaaagccgctttgaaatggttttattatcaaagagctagcactgccctgccctttgaatttgccggaaaatggatgcgggcagccgggcacccagacaccagcgttagcttttacccagaagctgaaaagccagcaggctggaaaatcagcagtccaaagggctggtacgatgcaggcgattatggcaaatatgttgtgaacagcggaatttctgttttcactcttttggaattatatgagcattttgaaaaagaactcaaaaaagtttctttgaacattcccgaaagcaaaagccaaacaccggatattttagaagaggtgcgctggaacctagactggatgctgacaatgcaagacccagaagacggcggagtttaccacaaattaaccaccgcaagattcagcgggcacgaattgccagaaggcgatattgcaaaaagatatgtggttatgaaaacaagcaccgctgctttgaactttgccgctgttatggcgcaggcaagccgcgtttacaaaccctttgacgcaaaattttctgcaaaagccattgccgccgcagaaaaagcctttgaatgggcaacaaaaaatccgtcaattctattcaagcagcccgatggcatgaacacagggcaatacgcccctagcgatgaaacagtccaagacgaaaaactatgggcagcagcagagctttacataagcacaaagaaaaaatcttatgcagatttaattgatatcgttccctttgacggtgccgcaccttggtggggcaatgtgaatttcttggctgtgtatagaatttcagatgtcaaaaacggatttaaaaaagatttgagcaaaaaagctcaagacacccttgtagcggctgcaaatacgctcaaagacatagcagaaaattcagcttatggcatacccgtaaataaatggaattttgtttggggttcaaattctgctgttgcaaataatggcattttgcttttgcatgcatattatttaacaaaaaacaaaagctatttagatgccgctcaaagagccttggattatcttttgggagcaaaccccattgatataagttttgtgaccggacacggcaacagaactccaatgtccccacaccacagaccatccgagggagacggaattacagagccagtgccaggaatgctggttggcgggccgcacgagggtgggcaagatgttaaaccaaacgggcgttgcgaaaactatgtgcaaaaaggcaaacccgctctctcctatttagaccacgactgcagctatgcaaccaatgaagttgctataaactggaacagccccttagtttacctttctggtgctttgcactttttgaacgtaaaatga

SEQ ID NO: 298 - protein, 573 aa, Unknown
  Obtained from environmental sample
MIFYILPMKPFLTLIFMATLLNAQTHGFGARINQIGYGEQAKKILVLKDAGATSVEFKDLASGKTVLNAPLSAPATWEYSGESVRKADFSGIAKKGVYAAYVNGTRISDNIIVQNNVYENVFKAALKWFYYQRASTALPFEFAGKWMRAAGHPDTSVSFYPEAEKPAGWKISSPKGWYDAGDYGKYVVNSGISVFTLLELYEHFEKELKKVSLNIPESKSQTPDILEEVRWNLDWMLTMQDPEDGGVYHKLTTARFSGHELPEGDIAKRYVVMKTSTAALNFAAVMAQASRVYKPFDAKFSAKAIAAAEKAFEWATKNPSILFKQPDGMNTGQYAPSDETVQDEKLWAAAELYISTKKKSYADLIDIVPFDGAAPWWGNVNFLAVYRISDVKNGFKKDLSKKAQDTLVAAANTLKDIAENSAYGIPVNKWNFVWGSNSAVANNGILLLHAYYLTKNKSYLDAAQRALDYLLGANPIDISFVTGHGNRTPMSPHHRPSEGDGITEPVPGMLVGGPHEGGQDVKPNGRCENYVQKGKPALSYLDHDCSYATNEVAINWNSPLVYLSGALHFLNVK

SEQ ID NO: 299 - DNA, 1746 bp, Unknown
  Obtained from environmental sample
ttgactttgtcaaggggaccacccgctattttctatattctatctatgaaaccgtttttcgcacttatttttatggtaacacttgtaaacgcacaaactcatggattcggggctagaataaaccaaattggctatggagaacaggctaaaaaaattttggttttgaaagacgcgggagccacctctgttgaatttaaagatttaacgaacggcaaaactgtattgaatgtgcccttatctgctccagcaacttgggaatatagcggagagtctgtgcgcaaggcagatttttctgggattgcgaaaaaaggagtttatgccgcatacgtaaacggagccagagtttctgataatataattgtgcaaaacaatgtttacgaaaatgtgttcaaagccgctttgaaatggttttattatcaaagagctagcactgccctaccctttgaatttgctggtaaatggatgcgagcagctggacacccagacaccagcgttagcttttacccagaatccgaaaagccagcaggctggaaaatcagcagtccaaagggttggtacgatgcaggcgactatggcaaatatattgtgaacagcggaatttccgttttcactcttttggaattatatgagcattttgaaaaagaactcaaaaaagtttctttgaacattcccgaaagcaaaagccaaacgccggatattttagaagaggtgcgctggaacctagactggatgctgacaatgcaagacccagaagacggcggagtttaccacaaattaaccaccgcgagattcagtgggcacgaattgccagaaggcgatattgcaaagagatatgtggttatgaaaacaagtaccgccgctttgaactttgccgctgttatggcacaggcaagccgcgtttacaaaccctttgatgcaaaattctccgcaaaagccattgccgccgcagaaaaagcatttgaatgggcaacaaaaaatccgtctattctattcaagcaaccagatggcatgaacacagggcaatacgcccctagcgacgaaacagtccaagacgaaaaactatgggcagcagtagaactctacataagcacaaagaaaaaatcttatgcagatttaattgatatcgttccctttgacggtgccgcaccttggtggggcaacgtgaactttttggctgtgtacaggatttccgatgtcaaaaacggatttaaaaaagatttgagcaaaaaggctcaagacacccttatagcggctgcaaatatgctcaaagatatagcagaaaattccgcttatggaatacccgtaaataaatggaattttgtttggggctcaaattctgctgttgcaaataatggcattttgcttttgcacgcatattatttaacaaaaaacaaaagctatttagatgccgctcaaagagccttggattatcttttgggagcaaaccccattgatataagttatgtgaccgggcatggcaacagaacgccaatgtctccgcaccacagaccctccgaaggagatggcatcacagaaccggtgccgggaatgttggttggtgggccgcacgagggtgggcaagatgttaaaccaaatgggcgttgcgaaaactatgtgcaaaaaggcaaacccgctctctcctatttagaccacgactgcagctatgcaaccaatgaagttgccataaactggaacagccccttagtttacctttctggtgcattgcactttttgaacacaaaatga

SEQ ID NO: 300 - protein, 581 aa, Unknown
  Obtained from environmental sample
MTLSRGPPAIFYILSMKPFFALIFMVTLVNAQTHGFGARINQIGYGEQAKKILVLKDAGATSVEFKDLTNGKTVLNVPLSAPATWEYSGESVRKADFSGIAKKGVYAAYVNGARVSDNIIVQNNVYENVFKAALKWFYYQRASTALPFEFAGKWMRAAGHPDTSVSFYPESEKPAGWKISSPKGWYDAGDYGKYIVNSGISVFTLLELYEHFEKELKKVSLNIPESKSQTPDILEEVRWNLDWMLTMQDPEDGGVYHKLTTARFSGHELPEGDIAKRYVVMKTSTAALNFAAVMAQASRVYKPFDAKFSAKAIAAAEKAFEWATKNPSILFKQPDGMNTGQYAPSDETVQDEKLWAAVELYISTKKKSYADLIDIVPFDGAAPWWGNVNFLAVYRISDVKNGFKKDLSKKAQDTLIAAANMLKDIAENSAYGIPVNKWNFVWGSNSAVANNGILLLHAYYLTKNKSYLDAAQRALDYLLGANPIDISYVTGHGNRTPMSPHHRPSEGDGITEPVPGMLVGGPHEGGQDVKPNGRCENYVQKGKPALSYLDHDCSYATNEVAINWNSPLVYLSGALHFLNTK

SEQ ID NO: 301 - DNA, 1743 bp, Unknown
  Obtained from environmental sample
ttgattttgtcaaggggacccgctattttctatattctatctatgaaaccatttttcgcacttatttttatggtaacacttgtaaacgcacaaactcatggattcggggctagaataaaccaaattggctatggagaacaggctaaaaaaatcttgattttgaaagacgctggagccacctctgtcgaatttaaggatttggcaagcggcaaaactgtattgaatgtgcccttatctgctccagcaacttgggaatatagcggagagtcggtgcgcaaggcagatttttctggaattgcgaaaaaaggggtttatgccgcatacgtaaacggagcaagagtttctgacaatataattgtgcaaaacgatgtttacggaaatgtgttcaaagcagctttgaaatggttttattatcaaagagccagcactgccctaccatttgaatttgccggaaaatggatgcgagcagccggacacccagacaccagcgttagtttttacccagaagccgaaaagccagcaggctggaaaatcagcagccccaagggctggtacgatgcaggcgattatggcaaatatgttgtgaacagcggaatttctattttcactcttttggaactatatgagcattttgaaaaagaactaaaaaaagtttctttgaacattcccgaaagcaaaagccaaacaccggatattttagaagaggtgcgctggaacctagactggatgctgacaatgcaagacccagaagacggcggagtttaccacaaattaaccaccgcaagattcagcggacacgaattgccagaaggcgatcttgcaaagagatatgtggttatgaaaacaagcaccgccgctttgaactttgccgctgttatggcacaggcaagccgagtttacaaaccctttgatgcaaaattctccgcaaaagccattgccgccgcagaaaaagcatttgaatgggcaacaaaaaatccgtcaattttattcaagcaacccgatggcatgaacacagggcaatacgcccctagcgatgaaacagtccaagatgaaaaactatgggcagcagtagaactctacataagcacaaagaaaaaatcttatgcagatttaattgatatagttccctttgacggtgccgcaccttggtggggcaatgtgaactttttggctgtgtacagaatttccgatgtcaaaaacggattcaaaaaagatttgagcaaaaaagctcaagacacacttatatcggctgcaaatatgctcaaggatatagcagaaaattccgcttatggaatacccgtaaataaatggaattttgtttggggttcaaattccgctgttgcaaataacggcattttgcttttgcacgcatattatttaacaaaaaacaaaagctatttagatgccgctcaaagagccttggattatcttttgggagcaaaccccatagatataagttttgtgaccggatacggcaacagaactccaatgtctccgcaccacagaccatccgaaggagatggaattacagaacctgtgccgggtatgctggttggcgggccgcacgagggtgggcaagatgttaaaccaaatgggcgttgcgaaaactatgtgcaaaaagggcaacccgccctctcctatttagaccacgactgcagctatgcaaccaatgaagttgccataaactggaacagccccttagtttacctctccggtgctttgcactttttgaacacaaaatga

SEQ ID NO: 302 - protein, 580 aa, Unknown
  Obtained from environmental sample
  SIGNAL (1)...(30)
MILSRGPAIFYILSMKPFFALIFMVTLVNAQTHGFGARINQIGYGEQAKKILILKDAGATSVEFKDLASGKTVLNVPLSAPATWEYSGESVRKADFSGIAKKGVYAAYVNGARVSDNIIVQNDVYGNVFKAALKWFYYQRASTALPFEFAGKWMRAAGHPDTSVSFYPEAEKPAGWKISSPKGWYDAGDYGKYVVNSGISIFTLLELYEHFEKELKKVSLNIPESKSQTPDILEEVRWNLDWMLTMQDPEDGGVYHKLTTARFSGHELPEGDLAKRYVVMKTSTAALNFAAVMAQASRVYKPFDAKFSAKAIAAAEKAFEWATKNPSILFKQPDGMNTGQYAPSDETVQDEKLWAAVELYISTKKKSYADLIDIVPFDGAAPWWGNVNFLAVYRISDVKNGFKKDLSKKAQDTLISAANMLKDIAENSAYGIPVNKWNFVWGSNSAVANNGILLLHAYYLTKNKSYLDAAQRALDYLLGANPIDISFVTGYGNRTPMSPHHRPSEGDGITEPVPGMLVGGPHEGGQDVKPNGRCENYVQKGQPALSYLDHDCSYATNEVAINWNSPLVYLSGALHFLNTK

SEQ ID NO: 303 - DNA, 1737 bp, Unknown
  Obtained from environmental sample
atgaaacaccctttcgccttgatttttatggctatcccctcgttatttctttttacccagtgccaaaatgcacagatttcaagttccagagcaaagataaaccaaatcggctatggagaggagtctaaaaaaatcctcatttttggcgatacagatgccaaatccgtggaattcaaggattcggcgagcggaaaaaccgttttgaccgccccattgtctgagccggcggtttgggagtacagcggagaaacagcacgcaaagcggatttttctgaattgaaaaagggacgatactccgcatatataaaaggggcaaaaaatccagatgatataatagtggacaacaatgcttacgaaaacgtttttaaagctgcgctaaaatggttctatttccagagggcatcaacagccctgagcgaagaatttgccggtaaatgggctagagaggcaggacacccggataccagcgtctattttttccccgaaagcgacaagccagcggattggaaaataagcagccccaaaggttggtatgatgccggggattacggcaaatacattgtgaatagcggaatttccgtcttcacccttttggagttttacgaacattttgaaaacgagcttaaaaatatctcctcaaacattccagagagtgggagtgcagtcccggatattttggaggaggttcgctggaacttggattggatgctcacaatgcaggacgcagacggcggagtttaccacaaactgacaacagcgcggttctgcggacatataatgcccaatttggacaccgcgagaagatatgtggttatgaaaacgaccaccgccaccttgaattttgccgctgtaatggctcaagcctcaagaatttacaaacactttgacgagcaattctcaaaaacagcattggcagcagcggaaaaagcctttgagtgggctagcaaaaaccccggcatcttatacaaacagccggacggaatgaacaccgggcaatatcaccatcccagagaaactgcgatggacgagcgtttgtgggcagcaacggagctttatataagtacccgaaaggagctttactcaaaatccatagattttgagtatccatcaaacctcaattcctctccttggtggggagatgcgaactttttggcggtttacaggctggcgaacggcaaaaacggctttgaggaaaatttaaccaaaacggcgcaaagcgctttattgtccttagcggataaacttagggacgttgcggaaaactctgcttacgggttgcccatattcaaagaaaactttgtttggggctcaaattccgtggttgcgaataatggcattgtgcttttgcacgcatattacctcacaggcgacaagcgttatctgagtgctgctcaaagagctttggattaccttttgggagccaaccctcttgacctgagttttgtgaccggatatggctacagaacgcctatgcatccgcatcaccgccagtccataggcgataccattttggagcctgtgcccggtatgctggtgggcggcccgcacgagggcgggcaggatattagacccggccaaaactgcgatgattatctacaaaaaggcaagcccgctctttcttacctagacaacgattgcagctacgcgaccaacgaggttgctataaactggaacgccccgctagtatatttgtcgggcgctttgcatttcttgaacaacggagcgaagaggccgtaa

SEQ ID NO: 304 - protein, 578 aa, Unknown
  Obtained from environmental sample
MKHPFALIFMAIPSLFLFTQCQNAQISSSRAKINQIGYGEESKKILIFGDTDAKSVEFKDSASGKTVLTAPLSEPAVWEYSGETARKADFSELKKGRYSAYIKGAKNPDDIIVDNNAYENVFKAALKWFYFQRASTALSEEFAGKWAREAGHPDTSVYFFPESDKPADWKISSPKGWYDAGDYGKYIVNSGISVFTLLEFYEHFENELKNISSNIPESGSAVPDILEEVRWNLDWMLTMQDADGGVYHKLTTARFCGHIMPNLDTARRYVVMKTTTATLNFAAVMAQASRIYKHFDEQFSKTALAAAEKAFEWASKNPGILYKQPDGMNTGQYHHPRETAMDERLWAATELYISTRKELYSKSIDFEYPSNLNSSPWWGDANFLAVYRLANGKNGFEENLTKTAQSALLSLADKLRDVAENSAYGLPIFKENFVWGSNSVVANNGIVLLHAYYLTGDKRYLSAAQRALDYLLGANPLDLSFVTGYGYRTPMHPHHRQSIGDTILEPVPGMLVGGPHEGGQDIRPGQNCDDYLQKGKPALSYLDNDCSYATNEVAINWNAPLVYLSGALHFLNNGAKRP

SEQ ID NO: 305 - DNA, 1623 bp, Unknown
  Obtained from environmental sample
atgaaaaagtatttgtgtctaattgcagtattccttttttcctgcacaagcgagatagaaagcgcggattctattttagaaaaatttttaaacgcttcttttaacggagaaagcggttcaaacgaagaaagcagttcaagctatgaaggcaatacaagtcaaggcaatgtaaacagctccggttcttcaaacagatcgagcagctcaagtaaattgagcagttcaggcggagcaagtagttcaagcggagcttcttcttcgagcagggcgagcagttcgtctaacatccttgcacctagcaattgccaagtttctgcaacgggtccggtttcctattacggtaaactaaaagccagcggaaaaaatatagttggctcaaaaactggtagcactccggtacaggtgcgcggtgtgagtttattttggagcaataccggctggggtggtgataagtttttcacagaaactacggttaacgcaatggtggactgctggaaatcggaagttatcagagtacctatgggacattcaattccgggcaaaagccaatattctggtagctatttggctgataaagctaaaaatatggctcgtgtaaaaactgctattgatgctgctattgctaaagatgtttacgttattatagattggcattcgcacagtgcccatgtagacccagataatgccattgagttttttacagctatggcgcaagattacggcagtaaagaccacgtgatttttgaaatttacaatgaaccaaaatgtgcaaacggtgcagacactgattggtgtgatgatggaaactggactacttgggcacaaataaaaacctatgcggagaaaattatccccgtaattcggagtaacggaggagcgaatagtttaattttggttggaacgccatatttctccgcagcagttgcttccgctaatgggaattatttaagtgataacaatgttggctatgtgttccatttttatgcgcaatctcataaaatgaatgatggcgcaccccccagttggagtaggacatattcagacggcgtaacaactgtgctaaatgcaggcaagccggtatttataaccgaatatggaacaacaaacgcggacggtggaggtggggctaattacaatagccacgatgccacaagttccaatgcttggcatacatttatggatacacacaaaatctcttctgctgcatggagcgttaacgataaacgcgaaggttcctcattctttggcacgggttccacttttaatatgagtagctgggataacacaagttctatgactgcttctgggcaatatattttcaacaaactcagaacttatgccaattccgctccgtggcgtagcggttccggcggtggtggcggcggcagctcaagcagtggcggcgggggcagttccacaaggtgcaaagatacacaaaaccgcgattatttttgccagtgggaaacaggatgctatgcgatagatccagcgttcgatgagccaataccattcgctaaagaatgtactgaaatggtgggtgattgtagaagctggggaagattatacatcaattctaccatagaaggaaaaggtgagatttgcaatggctctactgttaattga

SEQ ID NO: 306 - protein, 540 aa, Unknown
  Obtained from environmental sample
MKKYLCLIAVFLFSCTSEIESADSILEKFLNASFNGESGSNEESSSSYEGNTSQGNVNSSGSSNRSSSSSKLSSSGGASSSSGASSSSRASSSSNILAPSNCQVSATGPVSYYGKLKASGKNIVGSKTGSTPVQVRGVSLFWSNTGWGGDKFFTETTVNAMVDCWKSEVIRVPMGHSIPGKSQYSGSYLADKAKNMARVKTAIDAAIAKDVYVIIDWHSHSAHVDPDNAIEFFTAMAQDYGSKDHVIFEIYNEPKCANGADTDWCDDGNWTTWAQIKTYAEKIIPVIRSNGGANSLILVGTPYFSAAVASANGNYLSDNNVGYVFHFYAQSHKMNDGAPPSWSRTYSDGVTTVLNAGKPVFITEYGTTNADGGGGANYNSHDATSSNAWHTFMDTHKISSAAWSVNDKREGSSFFGTGSTFNMSSWDNTSSMTASGQYIFNKLRTYANSAPWRSGSGGGGGGSSSSGGGGSSTRCKDTQNRDYFCQWETGCYAIDPAFDEPIPFAKECTEMVGDCRSWGRLYINSTIEGKGEICNGSTVN

SEQ ID NO: 307 - DNA, 1641 bp, Unknown
  Obtained from environmental sample
atgaaaaagtatttgtgtctaattgcagtatcccttttttcctgcacaagcgaaatagaaagcgcggattctattttagaaaaatttttaaacgcttcttttaacggagaaagcggttcaaacgaagaaagtagttcaagctatgaaaacgatgaaagcaattcaagtcaaggcaatacaagtcaaggcaatacaagcggttctagttcttcaaacagatcgagcagctcaaataaatcaagtagttcaagtggggcaagcagttcaagtagggcttcttcttcgagcagggcgagcagttcgtctaacatccttgctcctagcaattgtcccgtttctacaacgggtccggtttcctattacggtaaactaaaagccagcggaaaaaatatagttggctcaaaaactggtagcactccggtacaggtgcgcggtgtgagtttattttggagcaataccggctggggtggtgataagtttttcacagaaactacggttaacgcaatggtggactgctggaaatcggaagttatcagagtgcctatgggacattcaattccgggcaaaagccaatattctggtagctatttggctgataaagctaaaaatatggctcgcgtaaaaactgctattgatgctgccattgctaaagatgtttacgttattatagattggcattcgcacagcgcccatgtagacccagataatgccattgagttttttacagctatggcgcaagattacggcagtaaagaccacgtgatttttgaaatttacaatgaaccaaaatgtgcaaacggtgcagacgatgattggtgtgctgatggaaactggactacttgggcacaaataaaaacctatgcggagaaaattatccccgtaattcggagtaacggaggagcgaatagtttaattttggttggaacgccatatttctccgcagcagttgcttccgctaatgggaattatttgagcgataacaatgttggctatgtgttccatttttatgcgcaaagtcataagagggccgattccgctccaccttggaatggtgatacatacgaatctggcgtaacaaaagtgctaaatgcaggcaagccagtatttataaccgaatatggaacaacaaacgcggacggtggaggtggggctaattacaatagccacgatgccacaagttccaatgcttggcatacatttatggataacaataaaatatcttcctgtgcttggagcgttaacgataaacgcgaaggttcctcgttctttggcacgggttcaagttttaatatgagtagctgggataacacaagttctatgactgcttctgggcaatatattttcaacaaactcagaacttatgccaattccgttccgtggcgtagcggttccggcggcggcggcagctcaagcagtggcagcggtgggggcagttccacaaggtgcaaagatacacaaaaccgcgattatttttgccagtgggaaacaggatgctatgcgatagatccagcattcgatgagccaataccatttgctaaagaatgtactgaaatggtggctgattgtagaagatggggaagattatacatcaattctaccatagaaggagaaggtgagatttgcaatggcactgctttatag

SEQ ID NO: 308 - protein, 546 aa, Unknown
  Obtained from environmental sample
MKKYLCLIAVSLFSCTSEIESADSILEKFLNASFNGESGSNEESSSSYENDESNSSQGNTSQGNTSGSSSSNRSSSSNKSSSSSGASSSSRASSSSRASSSSNILAPSNCPVSTTGPVSYYGKLKASGKNIVGSKTGSTPVQVRGVSLFWSNTGWGGDKFFTETTVNAMVDCWKSEVIRVPMGHSIPGKSQYSGSYLADKAKNMARVKTAIDAAIAKDVYVIIDWHSHSAHVDPDNAIEFFTAMAQDYGSKDHVIFEIYNEPKCANGADDDWCADGNWTTWAQIKTYAEKIIPVIRSNGGANSLILVGTPYFSAAVASANGNYLSDNNVGYVFHFYAQSHKRADSAPPWNGDTYESGVTKVLNAGKPVFITEYGTTNADGGGGANYNSHDATSSNAWHTFMDNNKISSCAWSVNDKREGSSFFGTGSSFNMSSWDNTSSMTASGQYIFNKLRTYANSVPWRSGSGGGGSSSSGSGGGSSTRCKDTQNRDYFCQWETGCYAIDPAFDEPIPFAKECTEMVADCRRWGRLYINSTIEGEGEICNGTAL

SEQ ID NO: 309 - DNA, 1647 bp, Unknown
  Obtained from environmental sample
atgagtattcactacaaccaggttggttatgatccacgtttaccgaaaagggcgattttaaccggaaaaggcgcgtgttgcatgattttaagcgagcgggagcttgacgctaaccgacagactgatgcgaaagcctacgaacctgtactttcagaggcgtcttacgatgaggcttcaggtgacacggtgcgggtcgtggatttttccgcactctcggaacctgggaagtattttctcatcgctgatggggaaaaggttactatcacaattaaagaaaagccataccacgaacttagcaacgcactggtgaaggggctttactatcagcgctgcggctgtgaactgccggaaaaattcgcgggccctttccgccacgcgccatgccatcttggaaaagccacccttgtcaaggacaacggagagcttgatacgaatactgtgatcgaatgcgcggggggttggcatgatgccggggattatggccgttacatcgcccctgctgcggtgacggttgcccatatgctctactccttcgaattctttccacaagtatacaaagaccagctaaacattccggaaagcggcaacggggtaccggacattctcaacgaatgtcggtacgagctggaatggatgctcaagatgcagagagccgacggagggctttaccacaaggtggccacacggtatttcgccaaattcattatgcccgaagaagacaaggacgatctttttcttttcagggttagccactgttccactgcgggctttgccgcctcagcggtgcaagcgtctcgggtttaccgggcttacgatgccgcctttgccgacaggctccttgtggctgcgaaaaaagcctgggactggatggaggcgaaccctttgttcgagcctttcgtcaatccgcccaactatcattccggcggatatggagattccagttgcgaagacgaactcttctgggcttccgccgaactgtattccgtcaccggagaggatcgctacctggcggctctgaaaaaacttatcagtacggtagatattgccaggtttggctggcgggacactgccggcttcggagccctctgctgtcttttcatcatgaaggacaagctggaggagaacttgtttgcctccctaaaagagaggtttctccagagcgcagattccttccttgacctgaccaaaagaagcggttacggtacggccatggctgcggacagctatgtctggggaagcatactcccaatcctcaacaacgccatcgccctgatttgcgccagcctcctaaccggaaaagacgaatactcgaaagccgcccggaatcagctggattatcttttggggatcaacgccacaggctacagctttgtgacaggttttggggaacgggcctaccgcttcccgcaccaccggccttcttacgccgacggggtggacgatcccgtgccgggtttggtgtccggcggccccaacaaggcataccccgaccctgtggcaaaaatgaccataccccggatacgccaccagcgaaattctacatcgaccatacgcccacagcttcgaccaacgaaatcgcgatatactggaattcaccggcggtctttttggcggcttattttgattcgctttaatcggggattttaa

SEQ ID NO: 310 - protein, 548 aa, Unknown
  Obtained from environmental sample
  DOMAIN (3)...(87): N-terminal ig-like domain of cellulase
MSIHYNQVGYDPRLPKRAILTGKGACCMILSERELDANRQTDAKAYEPVLSEASYDEASGDTVRVVDFSALSEPGKYFLIADGEKVTITIKEKPYHELSNALVKGLYYQRCGCELPEKFAGPFRHAPCHLGKATLVKDNGELDTNTVIECAGGWHDAGDYGRYIAPAAVTVAHMLYSFEFFPQVYKDQLNIPESGNGVPDILNECRYELEWMLKMQRADGGLYHKVATRYFAKFIMPEEDKDDLFLFRVSHCSTAGFAASAVQASRVYRAYDAAFADRLLVAAKKAWDWMEANPLFEPFVNPPNYHSGGYGDSSCEDELFWASAELYSVTGEDRYLAALKKLISTVDIARFGWRDTAGFGALCCLFIMKDKLEENLFASLKERFLQSADSFLDLTKRSGYGTAMAADSYVWGSILPILNNAIALICASLLTGKDEYSKAARNQLDYLLGINATGYSFVTGFGERAYRFPHHRPSYADGVDDPVPGLVSGGPNKAYPDPVAKMTIPRIRHQRNSTSTIRPQLRPTKSRYTGIHRRSFWRLILIRFNRGF

SEQ ID NO: 311 - DNA, 1569 bp, Unknown
  Obtained from environmental sample
atgaaaaagtatttgtgtctaattgcagtattccttttttcctgcacaagcgagatagaaagcgcggattctattttagaaaaatttttaaacgcttcttttaacggagaaaacggttcaaacgaagaaagcagttcaagctatgaaaacgatgaaagcaattcaagtcaaggcaatacaagcggttctagttcttcaaacagatcgagcagctcaaataaatcgagcagttcaagtggggcaagcagttcaagcggagcttcttcttcgagcagggcgagcagttcgtctaacatctctacgcctagcaattgtcccgttagaacagggcccgtttctacttatggagctttgaaggcttgtactgtgagcggcaaaggcagaatatgcggttccggttcctatgctagcacagccgtgcaggtgcgcggtgtgagcctattctggagcaacaccggatggggcggtgacagatttttcacagcgactacggttaatgcaatggtggactgctggaaagctgatgtaatccgcgttccaattggctattcggaaggcggcggctataaaacagatgctagcaataaaaccagagtaaaaacggctgttaatgcggcaatagcaaaaggagtttacgtaattatagactggcactcgcaccatgccgaagatgaaacaacagcagccaaggcgttttttgaagagatggcattagaatatggagataaagacaacgtgatttttgaaatctacaatgaacctctgaataccacctcttggtcaaccataaaaagctacgcaaccaccattaccagtgcaattcgtgctaaaggatcggataatttggttttggttggtacgccagagtggtctgcaaggcctaatcaagctaacgggaactatttaagcgatggcaatgttggttatgttttccatttttatgcgaaatcgcatacggttagctcctacggaagtggtatagaaactgtgttgaatgcaggtaagccgatatttgtaaccgaatacggaacaactcatgcagatggtggttgtaatccagccgaccaatactctacttgccaaaatggaaatcaatacaatagccacgatgcagcaagttccaatgcttggcatacatttatggatacacacaaaatctcttctgctgcatggagcgttaacgataaactagaaggggcagcgttttttggcacgggttcaagttttaatatgagcagttgggcagacaaaagcaaaatgactgcatctgggcaatatatttacgacaagctcaatgcatacgctaatcctaatgctaaccccaaccccaaccccagctcaagcagtggcggcgggggcagttccacaaggtgcaaagatacacaaaaccgcgattatttttgccagtgggaaacaggatgctatgcgatagatccagcgttcgatgagccaataccattcgctaaagaatgtactgaaatggtgggtgattgtagaagatggggaagcttatacattaatgttaccaatgaaggagaagatgagacttgcaatggcactgctttatag

SEQ ID NO: 312 - protein, 522 aa, Unknown
  Obtained from environmental sample
  SIGNAL (1)...(22)
MKKYLCLIAVFLFSCTSEIESADSILEKFLNASFNGENGSNEESSSSYENDESNSSQGNTSGSSSSNRSSSSNKSSSSSGASSSSGASSSSRASSSSNISTPSNCPVRTGPVSTYGALKACTVSGKGRICGSGSYASTAVQVRGVSLFWSNTGWGGDRFFTATTVNAMVDCWKADVIRVPIGYSEGGGYKTDASNKTRVKTAVNAAIAKGVYVIIDWHSHHAEDETTAAKAFFEEMALEYGDKDNVIFEIYNEPLNTTSWSTIKSYATTITSAIRAKGSDNLVLVGTPEWSARPNQANGNYLSDGNVGYVFHFYAKSHTVSSYGSGIETVLNAGKPIFVTEYGTTHADGGCNPADQYSTCQNGNQYNSHDAASSNAWHTFMDTHKISSAAWSVNDKLEGAAFFGTGSSFNMSSWADKSKMTASGQYIYDKLNAYANPNANPNPNPSSSSGGGGSSTRCKDTQNRDYFCQWETGCYAIDPAFDEPIPFAKECTEMVGDCRRWGSLYINVTNEGEDETCNGTAL

SEQ ID NO: 313 - DNA, 1332 bp, Unknown
  Obtained from environmental sample
atgcgcttatttttggttgccgtggctttggtaattgctgttttaggatgcagtgatggcaaactcaatttattgctcgttttttggggagaccacgaggactccagttctagcgtaacacccccagaacctaagccctcaagctcaagcttccacgtaaactcaagtgcggctccaaaacccagcagttcaagcgtatatatatcctcatcttcatcttccacagcagaagaattgccctccagctcctccgaagaaaagagttccagctccagagggcctaggtctagctctgcaaaaacggatagtaatggtaatacttatgaggattatcctacccttgaggtaggagcaccgaatgttaaaaaagccgtaactacgcgttattgggatggttgcaaaccgcattgctcatggccagaacacattggaaaccctaaaccttggactattgcaaaatcttgcgataaaaacggttataacgaaataccccttctttttttagattcacgctctgatcagtggggaacatattatggtcgcacgcctagtgcttgggatgctggcactgccgaagcaacatcttggcttaatagtgaaacctacaaagactgggttcaagcaaaccctaatttcacaaaaaacagtcttgcctatacttgctttgatttggcaccgtacgctgtgaacgataccctagcttacgcatttgcggctacgcatgaaagaactcttccttgtggcaagtgcgctcgcttgcaattcaataatgaatggacctatgataaaaattatgagggtaatagcaagccaagggtaacgcatagagcgcttaaaggcaaaaccttgattgtaatggcaaacaataccggtactgttggcgagaaccattttgatcttatgattccgggcggtggcgtgggtgctgttaactgtttgacagagcaaataggtttaccgccaaaagaaccttccattggaatattagggcacgtaatgggcggtttgttaagcgaatgttcatacaacgaagatccgtcatacggtgtgccaagtgatagattcactttggcacagtggcaagactgccttgaaaaaaggtgccatagagcatttgatagggtcaagaacgaagctcctcatcttttagcaggttgcttatggcatgtggaatggtttatggcagcggataatcctgaagtggaatgggttgaaactacttgcccaaaatatttgcttgataaatacggttcaacggctacaactaaactccccgactgctacacctcaactccaagaacgtgtcaaattgatggagttaatagcaattaa

SEQ ID NO: 314 - protein, 443 aa, Unknown
  Obtained from environmental sample
  SIGNAL (1)...(16)
MRLFLVAVALVIAVLGCSDGKLNLLLVFWGDHEDSSSSVTPPEPKPSSSSFHVNSSAAPKPSSSSVYISSSSSSTAEELPSSSSEEKSSSSRGPRSSSAKTDSNGNTYEDYPTLEVGAPNVKKAVTTRYWDGCKPHCSWPEHIGNPKPWTIAKSCDKNGYNEIPLLFLDSRSDQWGTYYGRTPSAWDAGTAEATSWLNSETYKDWVQANPNFTKNSLAYTCFDLAPYAVNDTLAYAFAATHERTLPCGKCARLQFNNEWTYDKNYEGNSKPRVTHRALKGKTLIVMANNTGTVGENHFDLMIPGGGVGAVNCLTEQIGLPPKEPSIGILGHVMGGLLSECSYNEDPSYGVPSDRFTLAQWQDCLEKRCHRAFDRVKNEAPHLLAGCLWHVEWFMAADNPEVEWVETTCPKYLLDKYGSTATTKLPDCYTSTPRTCQIDGVNSN

SEQ ID NO: 315 - DNA, 1734 bp, Unknown
  Obtained from environmental sample
atgacccgtaccagaaccgcgatgctcgccgccctgacgctggtcgccggcgcctccggcacggcactggccgcccattccgcgagcgccggagccgcggccgccgcctgcaccgtcgactacaaggtgcagaacgactggggaagcggattcaccgctgccgtgaccgtcaccaacaacggtgccgccacgtccaactggtcgctgggctggagctacgccggcagccagaaggtcaccaacagctggaacgcgaaggtcagtcagagcggtgccgccgtcaccgcggccaacgagtcctacaacggcaccctgtccaccggcggttcggcgagcttcggcttccaggccacctacagcggcagcaacgcgatcccggccaccttcatcctcaacggcgtgacctgcaacgtggacggcgggaccgacccgacggacccgaccgatcccacggacccgaccgaccccaccgggccgtccgaccgggtggacaacccctatgacggcgcccaggtctacgtgaaccccgagtggtccgcccacgccgcggccgagcccggcggtgaccgcatcgccgacgagccgaccggtgtgtggctcgaccggatcgccgccatcgagggcgcgaacggcggcatgggcctgcgcgagcacctggacgcggcgctggagcagaagggctccggcgagatggtcgtccagctcgtcatctacaacctgccgggacgcgactgctccgccctcgcctccaacggcgaactgggcccgaccgagatcgaccggtacaagagcgagtacatcgacccgatcgccgagatcctcggggactcgaagtacgcggacctccggatcgtcaccacggtcgagatcgactcgctgcccaacctggtcaccaacgtctccgggcgacccaccgccacggagaactgcgacgtgatgaaggccaacggcaactaccagaagggcgtcggctacgccctgaacaagctcggcgacgtcggcaacgtctacaactacgtcgacgccggtcaccacggctggctcggctgggacagcaacttcggcccctccgccgagatgttcaagaccgccgccaccaccgagggggcgaccgtcgacgacgtgcacggcttcatcgtcaacaccgccaactacagcgccctgaaggaggagaacttcaagatcacggactcggtgaacgggacctccgtgcgccagtccaagtggatcgactggaaccagtacaccgacgaactgtcctacgcccaggccatgcgcgacaagctggtctcgctcggcttcgacacgaacctcggcatgctgatcgacacctcccgcaacggctggggcggcacccagcggcccaccggtcccggcgccacgacgaacgtcgacacctacgtcgacggcggcaagtacgaccgtcgcatccacctcggcaactggtgcaaccagtccggagccggcctcggtgaacgcccgcaggccagccccgccgccgggatcgacgcgtacgtgtggatgaagcccccgggcgagtccgacggctccagcaagctgatcgacaacccggacggcaagggcttcgaccggatgtgcgacccgacctacacgggcaacgcgcgcaacggcaacaacatgtcgggcgccctgcccgacgccccgatctccggggcctggttctccgcgcagttccaggagctgatgaagaacggctacccgcccctgtcgtga

SEQ ID NO: 316 - protein, 577 aa, Unknown
  Obtained from environmental sample
MTRTRTAMLAALTLVAGASGTALAAHSASAGAAAAACTVDYKVQNDWGSGFTAAVTVTNNGAATSNWSLGWSYAGSQKVTNSWNAKVSQSGAAVTAANESYNGTLSTGGSASFGFQATYSGSNAIPATFILNGVTCNVDGGTDPTDPTDPTDPTDPTGPSDRVDNPYDGAQVYVNPEWSAHAAAEPGGDRIADEPTGVWLDRIAAIEGANGGMGLREHLDAALEQKGSGEMVVQLVIYNLPGRDCSALASNGELGPTEIDRYKSEYIDPIAEILGDSKYADLRIVTTVEIDSLPNLVTNVSGRPTATENCDVMKANGNYQKGVGYALNKLGDVGNVYNYVDAGHHGWLGWDSNFGPSAEMFKTAATTEGATVDDVHGFIVNTANYSALKEENFKITDSVNGTSVRQSKWIDWNQYTDELSYAQAMRDKLVSLGFDTNLGMLIDTSRNGWGGTQRPTGPGATTNVDTYVDGGKYDRRIHLGNWCNQSGAGLGERPQASPAAGIDAYVWMKPPGESDGSSKLIDNPDGKGFDRMCDPTYTGNARNGNNMSGALPDAPISGAWFSAQFQELMKNGYPPLS

SEQ ID NO: 317 - DNA, 1281 bp, Unknown
  Obtained from environmental sample
atgatgctctctcgcaggttcgggctcgcgctctcggcttccctgttgcttgccgccggctgcggcgctcgcgcgcagcccgcgggcgacgcctcgggaagcggggcctcgtcgttcaagggatcgtgggctgcgcccgccgaggaagaggcgccccaggcggtgacggccatgccagtgacgcccgcgaccggtccgcacgcggcgaccactcagaatccgttcgagggcgcgctgctctacgtcaaccccgattactcgaagcgcgtggaggcgacggccaagggggtgccgtcgagcgccgcggcgctgaagaagctctcgaggcaacccacggcgctctggctcgagtcgatcggctcgctgcagcatttgccgcgctggttcgcggacgccgagaagcaggagcaagcggcgggcaagcccgtcgtcccggtcctgctcgtgtacgaccttccgaaccgcgattgctcggcgaagtcgtccgcgggcgagctcacgatcgagaacggcggtgaggaacgctatcgcacggagttcatcgaccagatcgccaagcagatcaaggcgcacaggaatcagcgcctggtcgtgattctcgagccagactctttgccaaacctcgccacgaacctgaacgtgccgaagtgcgcggagtcggagcaggtgtaccgtaactcggtggcctacgcgattgcggagctctcgcttcccaacgtctggctctacctcgacgcagcgcacgcaggctggctcggctgggatgcgaaccgcaataggaccgccaagatcttcaaggaggttctggatcaggcagggggcgccgacaggatccgcggctttgccacgaacgtctccaactacacctcgctcgacggcgaggcgaacaggaagctcgagtggagcaaccccgctcccaatgagctcacgtacgtccggaagctagcgcagagcctcgagagcgtcggcgtcacgaacaagggttttttgatcgacacggggcgaaacggcaaggacggcgtgcgcacgaagtggggcaactggtgcaacgtcaagggtgccggtctcggcgaacgcccacgcgtgaaccctgcgccgctcatcgacgcctacgtgtggggcaagccgcctggagaatcggatgggacctccgatcctgccgcgaagcgcttcgacgagaactgcaggtcgcaagacgccgcaccagacgcgcccgaagcggggcaatggttccaggcgtacttcttggagctcgtgaagaacgccaatccgccactctga

SEQ ID NO: 318 - protein, 426 aa, Unknown
  Obtained from environmental sample
MMLSRRFGLALSASLLLAAGCGARAQPAGDASGSGASSFKGSWAAPAEEEAPQAVTAMPVTPATGPHAATTQNPFEGALLYVNPDYSKRVEATAKGVPSSAAALKKLSRQPTALWLESIGSLQHLPRWFADAEKQEQAAGKPVVPVLLVYDLPNRDCSAKSSAGELTIENGGEERYRTEFIDQIAKQIKAHRNQRLVVILEPDSLPNLATNLNVPKCAESEQVYRNSVAYAIAELSLPNVWLYLDAAHAGWLGWDANRNRTAKIFKEVLDQAGGADRIRGFATNVSNYTSLDGEANRKLEWSNPAPNELTYVRKLAQSLESVGVTNKGFLIDTGRNGKDGVRTKWGNWCNVKGAGLGERPRVNPAPLIDAYVWGKPPGESDGTSDPAAKRFDENCRSQDAAPDAPEAGQWFQAYFLELVKNANPPL

SEQ ID NO: 319 - DNA, 1281 bp, Unknown
  Obtained from environmental sample
atgatgctctctcgcaggttcgggctctcgctctcggcttccctgttgcttgccgccggctgcggcgctcgcgcgcagcccgcgggcgacgcctcgggaagcggggcctcgtcgtccaagggatcgtgggctgcgcccgccgaggaagaggcgccccaggcggtgacggccatgccagtgacgcccgcgaccggtccgcacgcggcgaccactcagaatccgttcgagggcgcgctgctctacgtcaaccccgattactcgaagcgcgtggaggcgacggccaagggggtgccgtcgagcgccgcggcgctgaagaagctctcgaggcaacccacggcgctctggttggagtcgatcggttcgctgcagcacttgccgcgctggctcgccgacgccgagaagcaggagcaagcagcgggcaagccggtggtcccggtcctgctcgtgtacgatctgccgaaccgcgattgctcggccaagtcgtccgcgggcgagctcacgatcgagagcggcggcgagcagcgctatcgcgcggagttcatcgaccagatcgccaagcagatcaaagcgcacaagaaccagcgcctggtcgtgattctcgagcccgattccttgccgaacctcgccacgaacctgaacgtgccgaagtgcgcggcgtcggagcaggtgtaccggaactcggtggcgtacgccgtctcggagctctcgcttccgaacgtctggctctacctcgacgcggcgcacgcaggctggctcggctgggatgcgaaccgcaataggaccgccaagatcttcaaggaggttctggatcaggcagggggcgccgacaggatccgcggctttgccacgaacgtctccaactacacctcgctcgacggcgaggcgaacaggaagctcgagtggagcaaccccgctcccaatgagctcacgtacgtccggaagctagcgcagagcctcgagagcgtcggcgtcacgaacaagggcttcttgatcgacacggggcgaaacggcaaggacggcgtgcgcacgaagtggggcaactggtgcaacgtcaagggtgccggtctcggcgaacgcccacgcgtgaaccctgcgccgctcatcgacgcctacgtgtggggcaagccgcctggagaatcggatgggacctccgatcctaccgcgaagcgcttcgacgagaactgcaggtcgcaagacgccgcaccagacgcgcccgaagcggggcaatggttccaggcgtacttcttggagctcgtgaagaacgccaatccgccactctga

SEQ ID NO: 320 - protein, 426 aa, Unknown
  Obtained from environmental sample
MMLSRRFGLSLSASLLLAAGCGARAQPAGDASGSGASSSKGSWAAPAEEEAPQAVTAMPVTPATGPHAATTQNPFEGALLYVNPDYSKRVEATAKGVPSSAAALKKLSRQPTALWLESIGSLQHLPRWLADAEKQEQAAGKPVVPVLLVYDLPNRDCSAKSSAGELTIESGGEQRYRAEFIDQIAKQIKAHKNQRLVVILEPDSLPNLATNLNVPKCAASEQVYRNSVAYAVSELSLPNVWLYLDAAHAGWLGWDANRNRTAKIFKEVLDQAGGADRIRGFATNVSNYTSLDGEANRKLEWSNPAPNELTYVRKLAQSLESVGVTNKGFLIDTGRNGKDGVRTKWGNWCNVKGAGLGERPRVNPAPLIDAYVWGKPPGESDGTSDPTAKRFDENCRSQDAAPDAPEAGQWFQAYFLELVKNANPPL

SEQ ID NO: 321 - DNA, 1281 bp, Unknown
  Obtained from environmental sample
atgatgctctctcgcaggttcgggctcgcgctctcggcttccctgttgcttgccgccggctgcggcgctcgcgcgcagcccgcgggcgacgcctcgggaagcggggcctcgtcgttcaagggatcgtgggctgcgcccgccgaggaagaggcgccccaggcggtgacggccatgccagtgacgcccgcgaccggtccgcacgcggcgaccactcagaatccgttcgagggcgcgctgctctacgtcaaccccgattactcgaagcgcgtggaggcgacggccaagggggtgccgtcgagcgccgcggcgctgaagaagctctcgaggcaacccacggcgctctggttggagtcgatcggttcgctgcagcacttgccgcgctggctcgccgacgccgagaagcaggagcaagcagcgggcaagccggtggtcccggtcctgctcgtgtacgatctgccgaaccgcgattgctcggccaagtcgtccgcgggcgagctcacgatcgagagcggcggcgagcagcgctatcgcgcggagttcatcgaccagatcgccaagcagatcaaggcgcacaggaatcagcgcctggtcgtgattctcgagccagactctttgccaaacctcgccacgaacctgaacgtgccgaagtgcgcggagtcggagcaggtgtaccgtaactcggtggcctacgcgattgcggagctctcgcttcccaacgtctggctctacctcgacgcagcgcacgcaggctggctcggctgggatgcgaaccgcaataggaccgccaagatcttcaaggaggttctggatcaggcagggggcgccgacaggatccgcggctttgccacgaacgtctccaactacacctcgctcgacggcgaggcgaacaggaagctcgagtggagcaaccccgctcccaatgagctcacgtacgtccggaagctagcgcagagcctcgagagcgtcggcgtcacgaacaagggttttttgatcgacacggggcgaaacggcaaggacggcgtgcgcacgaagtggggcaactggtgcaacgtcaagggtgccggtctcggcgaacgcccacgcgtgaaccctgcgccgctcatcgacgcctacgtgtggggcaagccgcctggagaatcggatgggacctccgatcctgccgcgaagcgcttcgacgagaactgcaggtcgcaagacgccgcaccagacgcgcccgaagcggggcaatggttccaggcgtacttcttggagctcgtgaagaacgccaatccgccactctga

SEQ ID NO: 322 - protein, 426 aa, Unknown
  Obtained from environmental sample
MMLSRRFGLALSASLLLAAGCGARAQPAGDASGSGASSFKGSWAAPAEEEAPQAVTAMPVTPATGPHAATTQNPFEGALLYVNPDYSKRVEATAKGVPSSAAALKKLSRQPTALWLESIGSLQHLPRWLADAEKQEQAAGKPVVPVLLVYDLPNRDCSAKSSAGELTIESGGEQRYRAEFIDQIAKQIKAHRNQRLVVILEPDSLPNLATNLNVPKCAESEQVYRNSVAYAIAELSLPNVWLYLDAAHAGWLGWDANRNRTAKIFKEVLDQAGGADRIRGFATNVSNYTSLDGEANRKLEWSNPAPNELTYVRKLAQSLESVGVTNKGFLIDTGRNGKDGVRTKWGNWCNVKGAGLGERPRVNPAPLIDAYVWGKPPGESDGTSDPAAKRFDENCRSQDAAPDAPEAGQWFQAYFLELVKNANPPL

SEQ ID NO: 323 - DNA, 984 bp, Unknown
  Obtained from environmental sample
atgtcgaccctgcgcactgtcgtgatcggcctgctcgccgtcggactggtcgccggcggccggcccgcacccgggctggccgtcgcgaccggcaatccactgaagctgaccagcggtttctacgtcgatcgggactccagcgcggcccgctatgtgcagcagcacccaggtgcgaccgcgatcaagaccaagatcgcggaccaggcgggtgcgcggtggttcggtcgtacgagcggcgacgtcaagcaggccgtgacggcgtacaccacagccgccgacaagctggacaagctgccggtggttgtcgcgggcaacatcccgggccgcgactgcggtggtcgctggagtggtggggccgagtcgcctgcggcgtaccggacctggatcagccagttctccgacgggatcgggaaccggccggcgatcgtggtgatcgagccggatgcgctggcgcggctcgactgcctgccgaggaaggaccggccggcgcggatcgcgcttctcaagtacgccgccaaccagttcgcgacgaagaacccgaacacctgggcgtacctggacgccggtacggcgaccacactggagaccaaggagatggcgcggcggctgcggctggtcgacgtcggcaaactccgtggcttcgcgctgaacgtctcgaactactacaccaccgaggagtcggcggcgaggggcaccgcgatcaaggcggcgctcggcggcgccggtgagttcgtcatcgacaccagccgcaacggcaacggctccaacggcacctggtgcaaccccatcggccgaaagctgggcgtcctcccgcaggtaggcgccgcacccgaccagtccgcccccacgactggaacacccgccgacctgctgctctggctcaccacgcccggcacctccgacggcctctgcggtctcaccccaaccgtccccctcgacaccttctcccccaccctcgccacccatctcatcaccggcacctga

SEQ ID NO: 324 - protein, 327 aa, Unknown
  Obtained from environmental sample
MSTLRTVVIGLLAVGLVAGGRPAPGLAVATGNPLKLTSGFYVDRDSSAARYVQQHPGATAIKTKIADQAGARWFGRTSGDVKQAVTAYTTAADKLDKLPVVVAGNIPGRDCGGRWSGGAESPAAYRTWISQFSDGIGNRPAIVVIEPDALARLDCLPRKDRPARIALLKYAANQFATKNPNTWAYLDAGTATTLETKEMARRLRLVDVGKLRGFALNVSNYYTTEESAARGTAIKAALGGAGEFVIDTSRNGNGSNGTWCNPIGRKLGVLPQVGAAPDQSAPTTGTPADLLLWLTTPGTSDGLCGLTPTVPLDTFSPTLATHLITGT

SEQ ID NO: 325 - DNA, 984 bp, Unknown
  Obtained from environmental sample
atgtcgaccctgcgcacggtcgtgatcggcctgctcgccgtcggactggtcgccggcggccggcccgcacccgggctggccgtcgcgaccggcaacccactgaagctgaccagcggtttctatgtcgatccggagtccagcgcggtccgctatgtacggcggcacccgggtgcgaccgcgatcaagaccaagatcgcagaccaggcgggtgcgcggtggttcggtcgtacgagcggcgacgtcaagcaggccgtgacggcgtacaccacagccgccgacaagctggacaagctgccggtggttgtcgcgggcaacatcccgggccgcgactgcggtggtcgctggagtggtggggccgagtcgcctgcggcgtaccggacctggatcagccagttctccgacgggatcgggaaccggccggcgatcgtggtgatcgagccggatgcgctggcgcggctcgactgcctgccgaggaaggaccggccggcgcggatcgcgcttctcaagtacgccgccaaccagttcgcgacgaagaacccgaacacctgggcgtacatggacgccggtacggcgaccacactcgagaccaaggagatggcgcggcggctgcggctggtcgacgtcggcaaactccgtggcttcgcgctgaacgtctcgaactactacaccaccgaggagtcggcggcgaggggcaccgcgatcaaggcggcgctcggcggcgccggtgagttcgtcatcgacaccagccgcaacggcaacggctccaacggcacctggtgcaaccccaccggccgaaagctgggcgcccccacgcaggtaggcgccgcacccgaccagtccgcccccacgaccggcacacctgccgacctgctgctctggctcaccacgcccggcacctccgacggcctctgcggactcaccccgaccgtccccctcgacaccttctcccccaccctcgccacccatctcatcaccggcacctga

SEQ ID NO: 326 - protein, 327 aa, Unknown
  Obtained from environmental sample
MSTLRTVVIGLLAVGLVAGGRPAPGLAVATGNPLKLTSGFYVDPESSAVRYVRRHPGATAIKTKIADQAGARWFGRTSGDVKQAVTAYTTAADKLDKLPVVVAGNIPGRDCGGRWSGGAESPAAYRTWISQFSDGIGNRPAIVVIEPDALARLDCLPRKDRPARIALLKYAANQFATKNPNTWAYMDAGTATTLETKEMARRLRLVDVGKLRGFALNVSNYYTTEESAARGTAIKAALGGAGEFVIDTSRNGNGSNGTWCNPTGRKLGAPTQVGAAPDQSAPTTGTPADLLLWLTTPGTSDGLCGLTPTVPLDTFSPTLATHLITGT

SEQ ID NO: 327 - DNA, 984 bp, Unknown
  Obtained from environmental sample
atgtcgaccctgcgcacggtcgtgatcggcctgctcgccgtcggactggtcgccggcggccggcccgcacccgggctggccgtcgcgaccggcaatccactgaagctgaccagcggtttctacgtcgatcgggactccagcgcggcccgctatgtgcagcagcacccaggtgcgaccgcgatcaagaccaagatcgcagaccaggcgggtgcgcggtggttcggtcgtacgagcggcgacgtcaagcaggccgtgacggcgtacaccacagccgccgacaagctggacaagctgccgatgcttgtcgcgggcaacatcccgggccgcgactgcggaggtcgctggagtggtggggccgagtcgccttcggcgtaccggacctggatcagccggttctccgacgggatcgggaaccggccggcgatcgtggtgatcgagccggatgcgctggcgcggctcgactgcctgccgaggaaggaccggccggcgcggatcgcgctgctcaagtacgccgccaaccagttcgcgacgaagaacccgaacacctgggcgtacctggacgccggtacggcgaccacactggagaccaaggagatggcgcggcggctgcggctggtcgacgtcggcaaactccgtggcttcgcgctgaacgtctcgaactactacaccaccgaggagtcggcggcgaggggcaccgcgatcaaggcggcgctcggcggcgccggtgagttcgtcatcgacaccagccgcaacggcaacggctccaacggcacctggtgcaaccccatcggccgaaagctgggcgtcctcccgcaggtaggcgccgcacccgaccagtccgctcccacgaccggcacacccgccgacctgctgctctggctcaccacgcccggcacctccgacggcctctgcggtctcaccccaaccgtccccctcgacaccttctcccccaccctcgccacccatctcatcaccggcacctga

SEQ ID NO: 328 - protein, 327 aa, Unknown
  Obtained from environmental sample
MSTLRTVVIGLLAVGLVAGGRPAPGLAVATGNPLKLTSGFYVDRDSSAARYVQQHPGATAIKTKIADQAGARWFGRTSGDVKQAVTAYTTAADKLDKLPMLVAGNIPGRDCGGRWSGGAESPSAYRTWISRFSDGIGNRPAIVVIEPDALARLDCLPRKDRPARIALLKYAANQFATKNPNTWAYLDAGTATTLETKEMARRLRLVDVGKLRGFALNVSNYYTTEESAARGTAIKAALGGAGEFVIDTSRNGNGSNGTWCNPIGRKLGVLPQVGAAPDQSAPTTGTPADLLLWLTTPGTSDGLCGLTPTVPLDTFSPTLATHLITGT

SEQ ID NO: 329 - DNA, 984 bp, Unknown
  Obtained from environmental sample
atgtcgaccctgcgcactgtcgtgatcggcctgctcgccgtcggactggtcgccggcggccggcccgcacccgggctggccgtcgcgaccggcagcccactgaagctgaccagcggtttctatgtcgatccggagtccagcgcggtccgctatgtacggcggcacccgggtgcgaccgagatcaagaccaagatcgcggaccaggcgggtgcgcggtggttcgttcgtacgagcggcgacgtcagccaggctgtgacggcgtacaccacggccgccgacaagctggacaagctgccgatgcttgtcgcgggcaacatcccgggccgcgactgcggtggtcgttggagtggtggggccgagtcgccttcggcgtaccggacctggatcagccagttctccgacgggatcggtgcccggccggcgatcgtggtgatcgagccggatgcgctggcgcggctcgactgcctgccgaggaaggaccggccggcgcggatcgcgctgctcaagtacgccgccaaccatttcgcgacgaagaacccgaacacctgggcgtacatggacgccggtacgacgaccacactcgagaccaaggagatggcgcggcggctgcggctggtcgacgtcggcaaactccgtggcttcgcgctgaacgtctcgaactactacaccaccgaggagtcggcggcgaggggcaccgcgatcaaggcggcgctcggcggcgccggtgagttcgtcatcgacaccagccgcaacggcaacggctccaacggcacctggtgcaaccccaccggccgaaagctgggcgcccccacgcaggtaggcgccgcacccgaccagtccgcccccacgaccggcacacctgccgacctgctgctctggctcaccacgcccggcacctccgacggcctctgcggactcaccccgaccgtccccctcggcaccttctcccccaccctcgccacccatctcatcaccggcacctga

SEQ ID NO: 330 - protein, 327 aa, Unknown
  Obtained from environmental sample
MSTLRTVVIGLLAVGLVAGGRPAPGLAVATGSPLKLTSGFYVDPESSAVRYVRRHPGATEIKTKIADQAGARWFVRTSGDVSQAVTAYTTAADKLDKLPMLVAGNIPGRDCGGRWSGGAESPSAYRTWISQFSDGIGARPAIVVIEPDALARLDCLPRKDRPARIALLKYAANHFATKNPNTWAYMDAGTTTTLETKEMARRLRLVDVGKLRGFALNVSNYYTTEESAARGTAIKAALGGAGEFVIDTSRNGNGSNGTWCNPTGRKLGAPTQVGAAPDQSAPTTGTPADLLLWLTTPGTSDGLCGLTPTVPLGTFSPTLATHLITGT

SEQ ID NO: 331 - DNA, 984 bp, Unknown
  Obtained from environmental sample
atgtcgaccctgcgcacggtcgtgatcggcctgctcgccgtcggactggtcgccggcggccggcccgcacccgggctggccgtcgcgaccggcaatccactgaagctgaccagcggtttctacgtcgatcgggactccagcgcggcccgctatgtgcagcagcacccaggtgcgaccgcgatcaagaccaagatcgcagaccaggcgggtgcgcggtggttcggtcgtacgagcggcgacgtcaagcaggccgtgacggcgtacaccacagccgccgacaagctggacaagctgccggtggttgtcgcgggcaacatcccgggccgcgactgcggtggtcgctggagtggtggggccgagtcgcctgcggcgtaccggacctggatcagccagttctctgacgggatcgggaaccggccggcgatcgtggtgatcgagccggatgcgctggcgcggctcgactgcctgccgaggaaggaccggccggcgcggatcgcgctgctcaagtacgccgccaaccagttcgcgacgaagaacccgaacacttgggcgtacctggatgccggtacgtcgaccacactcgagatcaaggagatggcgcggcggctgcggctggtcgacgtcggcaaactccgcggcttcgcgctgaacgtctcgaactactacaccaccgcggaatcggccgcgaggggcaccgcgatcaaggcggcgctcggcggcgccggcgagttcgtcatcgacaccagccgcaacggcaacggctccaacggcacctggtgcaaccccatcggccgaaagttgggcgtccccacgcaggtaggcgccgcacccgaccagtccgctcccacgaccggcacacctgccgacctgctgctctggctcaccacgcccggcacctccgacggcctctgcggactcaccccgaccgtccccctcgacactttctcccccaccctcgccacccatctcatcaccggcacctga

SEQ ID NO: 332 - protein, 327 aa, Unknown
  Obtained from environmental sample
MSTLRTVVIGLLAVGLVAGGRPAPGLAVATGNPLKLTSGFYVDRDSSAARYVQQHPGATAIKTKIADQAGARWFGRTSGDVKQAVTAYTTAADKLDKLPVVVAGNIPGRDCGGRWSGGAESPAAYRTWISQFSDGIGNRPAIVVIEPDALARLDCLPRKDRPARIALLKYAANQFATKNPNTWAYLDAGTSTTLEIKEMARRLRLVDVGKLRGFALNVSNYYTTAESAARGTAIKAALGGAGEFVIDTSRNGNGSNGTWCNPIGRKLGVPTQVGAAPDQSAPTTGTPADLLLWLTTPGTSDGLCGLTPTVPLDTFSPTLATHLITGT

SEQ ID NO: 333 - DNA, 1281 bp, Unknown
  Obtained from environmental sample
atgatgctctctcgcaggttcgggctcgcgctctcggcttccctgttgcttgccgccggctgcggcgctcgcgcgcagcccgcgggcgacgcctcgggaagcggggcctcgtcgttcaagggatcgtgggctgcgcccgccgaggaagaggcgccccaggcggtgacggccatgccagtgacgcccgcgaccggtccgcacgcggcgaccactcagaatccgttcgagggcgcgctgctctacgtcaaccccgattactcgaagcgcgtggaggcgacggccaagggggtgccgtcgagcgccgcggcgctgaagaagctctcgaggcaacccacggcgctctggctcgagtcgatcggctcgctgcagcatttgccgcgctggttcgcggacgccgagaagcaggagcaagcggcgggcaagcccgtcgtcccggtcctgctcgtgtacgaccttccgaaccgcgattgctcggcgaagtcgtccgcgggcgagctcacgatcgagaacggcggtgaggaacgctatcgcacggagttcatcgaccagatcgccaagcagatcaaggcgcacaggaatcagcgcctggtcgtgattctcgagccagactctttgccaaacctcgccacgaacctgaacgtgccgaagtgcgcggcgtcggagcaggtgtaccggaactcggtggcgtacgccgtctcggagctctcgcttccgaacgtctggctctacctcgacgcggcgcacgcaggctggctcggctgggatgcgaaccgcaataggaccgccaagatcttcaaggaggttctggatcaggcagggggcgccgacaggatccgcggctttgccacgaacgtctccaactacacctcgctcgacggcgaggcgaacaggaagctcgagtggagcaaccccgctcccaatgagctcacgtacgtccggaagctagcgcagagcctcgagagcgtcggcgtcacgaacaagggttttttgatcgacacggggcgaaacggcaaggacggcgtgcgcacgaagtggggcaactggtgcaacgtcaagggtgccggtctcggcgaacgcccacgcgtgaaccctgcgccgctcatcgacgcctacgtgtggggcaagccgcctggagaatcggatgggacctccgatcctaccgcgaagcgcttcgacgagaactgcaggtcgcaagacgccgcaccagacgcgcccgaagcggggcaatggttccaggcgtacttcttggagctcgtgaagaacgccaatccgccactctga

SEQ ID NO: 334 - protein, 426 aa, Unknown
  Obtained from environmental sample
MMLSRRFGLALSASLLLAAGCGARAQPAGDASGSGASSFKGSWAAPAEEEAPQAVTAMPVTPATGPHAATTQNPFEGALLYVNPDYSKRVEATAKGVPSSAAALKKLSRQPTALWLESIGSLQHLPRWFADAEKQEQAAGKPVVPVLLVYDLPNRDCSAKSSAGELTIENGGEERYRTEFIDQIAKQIKAHRNQRLVVILEPDSLPNLATNLNVPKCAASEQVYRNSVAYAVSELSLPNVWLYLDAAHAGWLGWDANRNRTAKIFKEVLDQAGGADRIRGFATNVSNYTSLDGEANRKLEWSNPAPNELTYVRKLAQSLESVGVTNKGFLIDTGRNGKDGVRTKWGNWCNVKGAGLGERPRVNPAPLIDAYVWGKPPGESDGTSDPTAKRFDENCRSQDAAPDAPEAGQWFQAYFLELVKNANPPL

SEQ ID NO: 335 - DNA, 1281 bp, Unknown
  Obtained from environmental sample
atgatgctctctcgcaggttcgggctcgcgctctcggcttccctgttgcttgccgccggctgcggcgctcgcgcgcagcccgcgggcgacgcctcgggaagcggggcctcgtcgttcaagggatcgtgggctgcgcccgccgaggaagaggcgccccaggcggtgacggccatgccagtgacgcccgcgaccggtccgcacgcggcgaccactcagaatccgttcgagggcgcgctgctctacgtcaaccccgattactcgaagcgcgtggaggcgacggccaagggggtgccgtcgagcgccgcggcgctgaagaagctctcgaggcaacccacggcgctctggctcgagtcgatcggctcgctgcagcatttgccgcgctggttcgcggacgccgagaagcaggagcaagcggcgggcaagcccgtcgtcccggtcctgctcgtgtacgaccttccgaaccgcgattgctcggcgaagtcgtccgcgggcgagctcacgatcgagaacggcggtgaggaacgctatcgcacggagttcatcgaccagatcgccaagcagatcaaggcgcacaggaatcagcgcctggtcgtgattctcgagccagactctttgccaaacctcgccacgaacctgaacgtgccgaagtgcgcggagtcggagcaggtgtaccgtaactcggtggcctacgcgattgcggagctctcgcttcccaacgtctggctctacctcgacgcagcgcacgcaggctggctcggctgggatgcgaaccgcaataggaccgccaagatcttcaaggaggttctggatcaggcagggggcgccgacaggatccgcggctttgccacgaacgtctccaactacacctcgctcgacggcgaggcgaacaggaagctcgagtggagcaaccccgctcccaatgagctcacgtacgtccggaagctagcgcagagcctcgagagcgtcggcgtcacgaacaagggcttcttgatcgacacggggcgaaacggcaaggacggcgtgcgcacgaagtggggcaactggtgcaacgtcaagggtgccggtctcggcgaacgcccacgcgtgaaccctgcgccgctcatcgacgcctacgtgtggggcaagccgcctggagaatcggatgggacctccgatcctaccgcgaagcgcttcgacgagaactgcaggtcgcaagacgccgcaccagacgcgcccgaagcggggcaatggttccaggcgtacttcttggagctcgtgaagaacgccaatccgccactctga

SEQ ID NO: 336 - protein, 426 aa, Unknown
  Obtained from environmental sample
  SIGNAL (1)...(25)
MMLSRRFGLALSASLLLAAGCGARAQPAGDASGSGASSFKGSWAAPAEEEAPQAVTAMPVTPATGPHAATTQNPFEGALLYVNPDYSKRVEATAKGVPSSAAALKKLSRQPTALWLESIGSLQHLPRWFADAEKQEQAAGKPVVPVLLVYDLPNRDCSAKSSAGELTIENGGEERYRTEFIDQIAKQIKAHRNQRLVVILEPDSLPNLATNLNVPKCAESEQVYRNSVAYAIAELSLPNVWLYLDAAHAGWLGWDANRNRTAKIFKEVLDQAGGADRIRGFATNVSNYTSLDGEANRKLEWSNPAPNELTYVRKLAQSLESVGVTNKGFLIDTGRNGKDGVRTKWGNWCNVKGAGLGERPRVNPAPLIDAYVWGKPPGESDGTSDPTAKRFDENCRSQDAAPDAPEAGQWFQAYFLELVKNANPPL

SEQ ID NO: 337 - DNA, 1818 bp, Unknown
  Obtained from environmental sample
atgttcagccggataggcaaatatgccaagaatttctgttttgccgttaatcatttgtggggtaatatagaaactggcgaaatagatttggtggctaatattttctatatttctcctatgaaaccatttttcacaattatttttatggtaacacttgtaaacgcacaaactcatggattcggggcaaaaataaaccaaattggctatggagaacaagctaaaaaaatcttggttttaaaagacgcaggaactgcttctgttgaatttaaagatttggcaagcggcaaaacagtattaaatgcaccattatctgctccggcaacttgggaatatagcggagagtcggtgcgtaaggcagatttttctggtattgtgaaaaaaggagtttatgccgcttatgtaaacggagcaagaatttccgacaatataattgtgcaaaacgacgtttatgaaaatgtattcaaagcttctttgaaatggttttactatcaaagggcaagcacggttctattgcccgaatttgctggcaaatgggcacgagcggctgggcactcagacactagcgttggcttttacccagaaaccgaaaagcccgcaggttggaaaatcagcagtcccaagggttggtacgatgcaggcgactatggcaaatacgttgtgaacagcgggatttctgttttcactcttttggaactctatgagcattttgaaaaagaactcaaaaaagtttctttgaacattcccgaaagcaaaagcaaaacgccagatattttagaagaagtgcgctggaacctagactggatgctaaccatgcaagacccagaagatggcggggtttaccacaaattgaccaccgcaagattcagcgggcacgaactgccagaagctgatattgcaaaaagatatgttgttatgaaaacaagcacagccgccttgaactttgccgctgttatggcacaggcaagccgcgtttacaaaccctttgatgcaaaattttccgcgaaagtcattgccgccgcagaaaaagcctttgaatgggcaacaaaaaatccgtcaattctattcaaacaaccagagggtatgaacacagggcaatacgcccctggcgatgaaacaatccaagacgaaaaactatgggcagcagcagaactctacatcagcacaaagaaaaaagattatgagaatataattgatatagttccctttgacggtgccgcaccttggtggggcaatgtgaattttttggctgtgtatagaatttccgatgccaaaaacggatttaaaaaagatttgagcaaaaaagctcaagacacccttatatcggcggcaaatacgctcaaagatatagcagaaaattccgcttatggcataccagtaaataaatggaattttgtttggggttcaaattctgccgttgcaaataatggaattttgcttttgcacgcctattatttaacaaagaacaaaagctatttagatgccgctcaaagagctttggattatcttttgggagcaaaccccatggatataagttatgtgaccggacacggcaacagaacgccaatgtctccgcaccacaggccatctgagggagatggtatcacagagccagtacccggaatgctagttggcggaccgcacgagggtgggcaagatgttaaaccaaatgggcgttgcgaaagctatgtgcaaaaaggcaaacccgccctctcctatttagaccacgactgcagctatgcaaccaatgaagttgccataaattggaacagcccattagtttatctttccggtgcgttgcactttttgaatgcaaaatga

SEQ ID NO: 338 - protein, 605 aa, Unknown
  Obtained from environmental sample
MFSRIGKYAKNFCFAVNHLWGNIETGEIDLVANIFYISPMKPFFTIIFMVTLVNAQTHGFGAKINQIGYGEQAKKILVLKDAGTASVEFKDLASGKTVLNAPLSAPATWEYSGESVRKADFSGIVKKGVYAAYVNGARISDNIIVQNDVYENVFKASLKWFYYQRASTVLLPEFAGKWARAAGHSDTSVGFYPETEKPAGWKISSPKGWYDAGDYGKYVVNSGISVFTLLELYEHFEKELKKVSLNIPESKSKTPDILEEVRWNLDWMLTMQDPEDGGVYHKLTTARFSGHELPEADIAKRYVVMKTSTAALNFAAVMAQASRVYKPFDAKFSAKVIAAAEKAFEWATKNPSILFKQPEGMNTGQYAPGDETIQDEKLWAAAELYISTKKKDYENIIDIVPFDGAAPWWGNVNFLAVYRISDAKNGFKKDLSKKAQDTLISAANTLKDIAENSAYGIPVNKWNFVWGSNSAVANNGILLLHAYYLTKNKSYLDAAQRALDYLLGANPMDISYVTGHGNRTPMSPHHRPSEGDGITEPVPGMLVGGPHEGGQDVKPNGRCESYVQKGKPALSYLDHDCSYATNEVAINWNSPLVYLSGALHFLNAK

SEQ ID NO: 339 - DNA, 1671 bp, Unknown
  Obtained from environmental sample
atgaatgtttcttatccactgttcacaatagctattacggggttctttttctctgcccaagcaggtgtttggattagaataaatcaagctggatatgcaccagaacgcaacaaaacagccattgttctttccgataccgatattgccggacaaatttggaatttgaaaaaaaacgatgcaacggttttaagtggcaaaattccagcaggcaaaccgggtgataatatttttgcagcgcaggcattcacatacacaatagatttcagcaagttaaaagagaaaggggactatgctttggaagtgcctggtgcccaaactcagcaagtgctcattaaagatgacccctattccctattcgccacccaaacgcttatgcacctacgtgctatgcgtagcaaacattcgggagacagtgccgctattgtacacaaggttaaaggcgattggaggcaaggtgcttggcaagagggggttcctcacaaaaccgtagatatgcaaggtgggcattatgatgctggcgactatataaaattcacattgaatgaagcctatctcgcttggcatttattgagtgcttatgtggaaaatccttccctttttgttaaagttcaaagcacctcaaatttgccagatattctagacgaagccaaatacagccttgattatttgctcaaaacattcccagacgaaaatacttttgtgatacaagtgggagacagcaaagaccacgaacagggatggcgacttccagaaatggatgctttgaacggcaaaagacccgcattgtgcgctttgtctcgcgtgcatatgggaagcacagccgcagcactcgctttgggtgcgaatgtgtttaaaaacttagatgcaaactccgccacaaaatacagagaaaaagcaaaagcaatttatgcccgcgctaggcaaagcgatactcaaacttcagcatttgaacgcaatgtaatcaacgatttttattttgaccaaacggacgaagacaacatggctttggcagccgcagaactcggcgatttaaaggcttatgcaccgcctgccgcaagcgaagtgagctggagcgattggaacgcatttgcaaattatcgcttggcagaacaaggagacgaagccgcaaaaagccgcctgcttttggaagcaaaacgctatgagcgggaaaatatatggaaccttccaggcgattatgtgtggggaagtttgcatcgctggattggcatggcgaatgttcatttaagggcgcagcgtttgcagggaaaagaattgtccttgccttttttgggtgttttggattatgtatttggccgcaacaactggggcatagcgatgctcgcctctgctaatttgccatatagcattcgcaatgtttacaacggaatttaccgcttaaccaaagtttttcccacaggtgctttatcagaaggtccgggggacaaagcgactcacttggaaatgcaaaaatactttaccattccaaaaaacaactcctttgaaaaattcaacacaaatgcaggagtgttttacgacaatgccgatgattttatgattcaagaaagcaccataggcgggcagggagatttgctccttatgcttgcgcttgcttctgccaaaaacctctctccaaaagcggatcccggaactgttccgcgccgcacgcaaaga

SEQ ID NO: 340 - protein, 557 aa, Unknown
  Obtained from environmental sample
  DOMAIN (15)...(107): N-terminal ig-like domain of cellulase
MNVSYPLFTIAITGFFFSAQAGVWIRINQAGYAPERNKTAIVLSDTDIAGQIWNLKKNDATVLSGKIPAGKPGDNIFAAQAFTYTIDFSKLKEKGDYALEVPGAQTQQVLIKDDPYSLFATQTLMHLRAMRSKHSGDSAAIVHKVKGDWRQGAWQEGVPHKTVDMQGGHYDAGDYIKFTLNEAYLAWHLLSAYVENPSLFVKVQSTSNLPDILDEAKYSLDYLLKTFPDENTFVIQVGDSKDHEQGWRLPEMDALNGKRPALCALSRVHMGSTAAALALGANVFKNLDANSATKYREKAKAIYARARQSDTQTSAFERNVINDFYFDQTDEDNMALAAAELGDLKAYAPPAASEVSWSDWNAFANYRLAEQGDEAAKSRLLLEAKRYERENIWNLPGDYVWGSLHRWIGMANVHLRAQRLQGKELSLPFLGVLDYVFGRNNWGIAMLASANLPYSIRNVYNGIYRLTKVFPTGALSEGPGDKATHLEMQKYFTIPKNNSFEKFNTNAGVFYDNADDFMIQESTIGGQGDLLLMLALASAKNLSPKADPGTVPRRTQR

SEQ ID NO: 341 - DNA, 1239 bp, Unknown
  Obtained from environmental sample
atgcgctcgcccgttgtcgtcgtcgccgtcctggtcggttccctgttcgccacttccgatccagcagtcgccgggaacgccgttctcggcccgggcaccacgctgtacgtgaatccggcgagcagcacgcagcaggcggccgccaagctcgaggggcaggcgcgcgccgacgcgctcgtgctcgccggctttccgtcggcgacgtggttcaccaagggcacgcccgcggaggtccaggccgcggtgaagaagctggtcgacgcggccgcggccaagaacgccgtggccaccgtcgtggcctacaacctgccgcaccgcgactgcagccagtactccgccggcggcgcgaccagcaaggccgaataccaggcgtggatcgacgcgttcgccgcgggcatcggcgatcgcaaggtggtggtcatcctcgagcccgatggcctgggcatcatcccgttccacaccgatctgtccggcaaggaggagtggtgcaagcccgccgaggccgacaaggccagcgcggccaaggagcgctacgagatgctgtcgtacgccgtcgacaagctgcgcgccaacccgcgctccgccgtctatctcgacggcacgcacagcgcctggctgggcgccggtgacatcgccagccgactcgtcaaggcgggcgtccagcgcgccagcggcttcttcatcaatgcctcgaactacgagcccaacgagaagctcctggactacggtacctgggtctcgcaatgcatccattacgggaccagcgcgggcgacaacaagggtcacttcgagcgctgcgcgagccagtatcacccggcgaacccgaacgactatgcgacctgggcgctcagccggaagtggtacgccgacaacgtcggcaaggcagcgggcccgctcactcactttgtcatcgacacgagccgcaacggccggggctcgtgggcgccgaagccgggcacgacctacaaggacgcgcagacctggtgcaacccgcccgaccgcggcctcggcgttcggccgaccacccgcaccggcaacccgctcgtcgacgcatacctgtggatcaagatccccggcgagtccgacggccagtgcgaccgcgggatgggcggcggcacggaccccgagcgcggctccgcggatccggcggccggtgcgtggttcgagaagcaggccgccgagctcatccagctcgcgaatcctccggtggcgcgcgcaccggccgcgaagaagaagtag

SEQ ID NO: 342 - protein, 412 aa, Unknown
  Obtained from environmental sample
MRSPVVVVAVLVGSLFATSDPAVAGNAVLGPGTTLYVNPASSTQQAAAKLEGQARADALVLAGFPSATWFTKGTPAEVQAAVKKLVDAAAAKNAVATVVAYNLPHRDCSQYSAGGATSKAEYQAWIDAFAAGIGDRKVVVILEPDGLGIIPFHTDLSGKEEWCKPAEADKASAAKERYEMLSYAVDKLRANPRSAVYLDGTHSAWLGAGDIASRLVKAGVQRASGFFINASNYEPNEKLLDYGTWVSQCIHYGTSAGDNKGHFERCASQYHPANPNDYATWALSRKWYADNVGKAAGPLTHFVIDTSRNGRGSWAPKPGTTYKDAQTWCNPPDRGLGVRPTTRTGNPLVDAYLWIKIPGESDGQCDRGMGGGTDPERGSADPAAGAWFEKQAAELIQLANPPVARAPAAKKK

SEQ ID NO: 343 - DNA, 1239 bp, Unknown
  Obtained from environmental sample
atgcgctcgcccgttgtcgtcgtcgccgtcctggtcggttccctgttcgccacttccgatccagcagtcgccgggaacgccgttctcggcccgggcaccacgctgtacgtgaatccggcgagcagcacgcagcaggcggccgccaagctcgaggggcaggcgcgcgccgacgcgctcgtgctcgccggctttccgtcggcgacgtggttcaccaagggcacgcccgcggaggtccaggccgcggtgaagaagctggtcgacgcggccgcggccaagaacgccgtggccaccgtcgtggcctacaacctgccgcaccgcgactgcagccagtactccgccggcggcgcgaccagcaaggccgaataccaggcgtggatcgacgcgttcgccgcgggcatcggcgatcgcaaggtggtggtcatcctcgagcccgatggcctgggcatcatcccgttccacaccgatctgtccggcaaggaggagtggtgcaagcccgccgaggccgacaaggccagcgcggccaaggagcgctacgagatgctgtcgtacgccgtcgacaagctgcgcgccaacccgcgctccgccgtctatctcgacggcacgcacagcgcctggctgggcgccggtgacatcgccaaccgactcgtcaaggcgggcgtccagcgcgccagcggcttcttcatcaatgcctcgaactacgagcccaacgagaagctcctcgactacggtacctgggtctcgcaatgcatccattacgggaccagcgcgggcgacaacaagggtcacttcgagcgctgcgcgagccagtatcacccggcgaacccgaacgactatgcgacctgggcgctcagccggaagtggtacgccgacaacgtcggcaaggcggcgggcccgctcactcactttgtcatcgacacgagccgcaacggccggggctcgtgggcgccgaagccgggcacgacctacaaggacgcgcagacctggtgcaacccgcccgaccgcggcctcggcgttcggccgaccacccgcaccggcaacccgctcgtcgacgcatacctgtggatcaagatccccggcgagtccgacggccagtgcgaccgcgggatgggcggcggcacggaccccgagcgcggctccgcggatccggcggccggtgcgtggttcgagaagcaggccgccgagctcatccagctcgcgaatcctccggtggcgcgcgcaccggccgcgaagaagaagtag

SEQ ID NO: 344 - protein, 412 aa, Unknown
  Obtained from environmental sample
MRSPVVVVAVLVGSLFATSDPAVAGNAVLGPGTTLYVNPASSTQQAAAKLEGQARADALVLAGFPSATWFTKGTPAEVQAAVKKLVDAAAAKNAVATVVAYNLPHRDCSQYSAGGATSKAEYQAWIDAFAAGIGDRKVVVILEPDGLGIIPFHTDLSGKEEWCKPAEADKASAAKERYEMLSYAVDKLRANPRSAVYLDGTHSAWLGAGDIANRLVKAGVQRASGFFINASNYEPNEKLLDYGTWVSQCIHYGTSAGDNKGHFERCASQYHPANPNDYATWALSRKWYADNVGKAAGPLTHFVIDTSRNGRGSWAPKPGTTYKDAQTWCNPPDRGLGVRPTTRTGNPLVDAYLWIKIPGESDGQCDRGMGGGTDPERGSADPAAGAWFEKQAAELIQLANPPVARAPAAKKK

SEQ ID NO: 345 - DNA, 1533 bp, Unknown
  Obtained from environmental sample
atgaatatgcaatgtctgtcaagcgcccttttcgcaagaaagggcttttcacttttcattattcccattcttttctttactccgatattgcctaaattgattaatcacaatctagctgggatcaaagcttctgtagccctagccgccagtgcacatgttgacaatccatacgcagatgctaagtggtacatcaatcctgactgggcagaggaagttcagaggacagcagcggccaagggaggcacacttggagcacagatgaggcaggttgctacttacccaacagctgtctggctggaccggatcgccgcagtcactggcggtcctagcgtcaagcggcccttagccggatacttggatgatgctttgttgcaggctcaaggaagcagtcaaccagtcgttatcactattgtcgtctatgacctgcccaaccgtgactgtgcagcattggcctccaatggagaactacttgtagctggcggcgggctggatacctacaggtcaaaatatattgatccgattgcagccacactaagcaatccaaagtacagcaacctcaggattgtggcaattatcgagccggactctcttcccaacctcatcaccaacctgaatgttccaaaatgcgctgaagctaactccagcgatgcctacaaattgggtgttcagtacgcgttggacaaactgcacgccatcccgaatgtgtacaactacgttgatatcgctcactctggctggctcggctggtccagtaacttccagccagccgtagacttgatcactagtgtgataaaggacacgactgcaggtgttaacagtgtggatggttttatcagcaacacagcgaactacatgccaaccaccgaaccattcataaccgctgaccagacgataggtggcaacccagtacactcttccaagttctatcaggggaaccagtatattgatgagttttcctatggtgctgctatgtacgatgcattcgtcaaagctggtctcccaagtagcattggcatgttaatcgacacgtcacgaaacggttgggggggacccaatcgcccaaaagttgctagtacgtcgacagatctggaaacatttgttggtgggagtaggattgaccagcggctagaccgtggcaactggtgcaaccagcccggaggtatcggtgctcggccaattgcaaaccctgcttctcactttgatgcatatgtctggatcaagccgccaggggagtcagatggtaccagcaactcggcgcaaaccacaccagatgcagagggtaagcgatttgatgcaatgtgtgatcccagtgccaacaatcggtacaatccattagtaaagacaggctcattgaacaacgcaccaaccgcaggccattggttcgagtcggcattcgagactctggtacagaacgccgacccgccacttcaaggttcggagtcatcgtccacagcgcctattccgccagtagcaacaactgtcttacctacgccgacagctactcctccatcagccttggtaaaagtgacctga

SEQ ID NO: 346 - protein, 510 aa, Unknown
  Obtained from environmental sample
MNMQCLSSALFARKGFSLFIIPILFFTPILPKLINHNLAGIKASVALAASAHVDNPYADAKWYINPDWAEEVQRTAAAKGGTLGAQMRQVATYPTAVWLDRIAAVTGGPSVKRPLAGYLDDALLQAQGSSQPVVITIVVYDLPNRDCAALASNGELLVAGGGLDTYRSKYIDPIAATLSNPKYSNLRIVAIIEPDSLPNLITNLNVPKCAEANSSDAYKLGVQYALDKLHAIPNVYNYVDIAHSGWLGWSSNFQPAVDLITSVIKDTTAGVNSVDGFISNTANYMPTTEPFITADQTIGGNPVHSSKFYQGNQYIDEFSYGAAMYDAFVKAGLPSSIGMLIDTSRNGWGGPNRPKVASTSTDLETFVGGSRIDQRLDRGNWCNQPGGIGARPIANPASHFDAYVWIKPPGESDGTSNSAQTTPDAEGKRFDAMCDPSANNRYNPLVKTGSLNNAPTAGHWFESAFETLVQNADPPLQGSESSSTAPIPPVATTVLPTPTATPPSALVKVT

SEQ ID NO: 347 - DNA, 1197 bp, Unknown
  Obtained from environmental sample
atgaaatgtaaatacatgtatttcttttttgtgagcttgctgattttcgcttgcaataacagcaataataatgataataacggcggtttagaatatcccgcacctcctagtcaatattcatcttcagatgtttctgcaccaggtcttggtgtttcctcatcttctaccatacttggcttgtcttctgcttttagctcatcttcaaacataaatttgtcttcaggcgaagtggcaacagctagttcttcttctgaaaccgcaccagaagttacaacctggcccacattgaaagaaggtgaccccggtgttctaaaaggctggggttcgcgctattgggacggctgtaagccgcattgctctctgcgcaataacgtggatacaaatgcagttcccttttccgtttgcagaaattgcaataaaaacaataaggagattccaacttttaccctaagccctgatattgaagtgcgctatcagcaatgggatgggcagatagttgaagactgggtaggttacagagaaacggttagtagttgccaatccggtggcatagcttatgcctgttgggatatggctccttatgcgttaaacgatactctttcctacgcttttatggctactgcacttaaaaatgcttcttgtggtcaatgctttcaaattcaatttgatggcggaaaccacggcaacgatataaaagaagctcataggcttcttaaaggaaaaaccttaattgtgatggctacaaatacaggttctgatgtggaaaccgggcagttcgatattatgatacccggcggaggccctggcatgttcgatagttttgcagagcagataggcgtaaataaagaccagttgggagaaggttatggcggttttctaacaacttgccagcgtgagttaaatgattacgataaacctgccaaagattatcaagactgcgttaaaagaaaatgcaatgcggtattttccaaagcggagcataaagatcttttgaggggatgtttgtggtttgcggattggtatatggcggcagataacccaacatacctctacaaaaaagtggattgcccaaagtattttacggataaatacccatccactataaacaaaagtgcaaacaacaaaattgagcctcctcctcccggtttcaataaaactatacccgctggctacgaaactcaaaagtggacttggtaa

SEQ ID NO: 348 - protein, 398 aa, Unknown
  Obtained from environmental sample
MKCKYMYFFFVSLLIFACNNSNNNDNNGGLEYPAPPSQYSSSDVSAPGLGVSSSSTILGLSSAFSSSSNINLSSGEVATASSSSETAPEVTTWPTLKEGDPGVLKGWGSRYWDGCKPHCSLRNNVDTNAVPFSVCRNCNKNNKEIPTFTLSPDIEVRYQQWDGQIVEDWVGYRETVSSCQSGGIAYACWDMAPYALNDTLSYAFMATALKNASCGQCFQIQFDGGNHGNDIKEAHRLLKGKTLIVMATNTGSDVETGQFDIMIPGGGPGMFDSFAEQIGVNKDQLGEGYGGFLTTCQRELNDYDKPAKDYQDCVKRKCNAVFSKAEHKDLLRGCLWFADWYMAADNPTYLYKKVDCPKYFTDKYPSTINKSANNKIEPPPPGFNKTIPAGYETQKWTW

SEQ ID NO: 349 - DNA, 2460 bp, Unknown
  Obtained from environmental sample
atgagtactttgaaggtaaagcaagtttcacttgttctaacaatcctagcagttcttgtggcaacttttatgggtttcacccagaagtctgctcgcgctgcggcaatttgtagcccagctacagccgttcccgttccattcaccaaagatggcgttggtgatgtttgtgtacaaaccacttcattgtgttcttacatcaactcatggaatacaacaaccattgaagtcaacggcacatcctacaccaacttatatacggcggcttcttccatccccgcagtaaatggcacttacaccattcactatgtctcaaccgttggttggggacactttgaaatgggtggtacatgcgccagcggcccaaccagcaccagcgctcctgccaccaacacgacggttgccccgacgcttacccgcaccaataccgtagctgctccaaccaacactgctgttggccccaccgctacccgcaccagtacaacggttgctcctaccgctacaacggttgctcctaccgctacatcggttccagccactagcacccccaccagcggcggtacgctcaaggttcagttggttggcggcggtacagacaatacccagcaaactgcattcaacttgctggtcgtgaacactggcaccagcgcagtatccaacatctctgcccgcatctacttcaccaccgaaaattccaatgccgcttccagctatgtgcttgagaagtactacgatcagtctggcgtttcgacagtttctggtccaaccttggcatctggctccacctactactacacagtcaactttggcactgcatcactgcctgctggcggtaactgggcttataacactgccatgcacctgagcagttgggcaagcacctacagcgccaccaacgacttctggcatggcactggcacactgcccgcctccttcaccaactggagcagtgtcccgctttatgtgaatggctcgctcgtttggggcagcgaacccggtggcgtagtcaacccgaccaacactgcagttggcccaaccgctacccgcaccaatacattggttgccccaactgcaactacaactggcccaacagccaccaagactaacaccccagttggtccgaccgctacccgcaccagcaccccagttggcccaacagccaccaagaccagcaccccagttggcccaacacccaccaactcacctcccggtactcacttggcgaaccccttcattggtgcccagttctatatcaaccacgattggcaaggttctgcaaccttccccaacgtcaacaccttcctgtggatggatagcattgccgcagtcaacggtaccggcgcttatgcccgcagtttggctggtcacctcgatctggccttggcccaaggcgcaaacgcagtcagcctcgtgatctacgacctgcccaaccgcgactgctctgctctctcctccaacggtgaactgctgcaagccaacaatggttcagcccgctaccgcactgagtacatcgacaacatctacaatattctgagccaacccaagtatgctggcctgcgcttcatcgccgtcatcgaaccggactccttgcctaacctgatcaccaacactagcattgccaagtgtcaggaagccaccagccccaccgatggttatgttgccaacaccacctacaccctgaacaagttctacaacctgcgcaacttctacagctacatcgacgttggtcacgctggctggctcggttggccgaacaacatgacccccttcgtgaccttggtaagcaacatggtcaagggtaccacccacggtgtcaacagcattgatggcttcatcgacaacaccgccaatacccaagttgaagtcgaaaccttccttgatgcagccacaattgttggcggcaaccccgtccgctcaggtagcttcttcgactggaacgactacatcgacgaatcgcactacgccgccgccctcaaggccgccttccaagccgctggtttgcccgcaagcagcacaaacttcctgatcgatacatcccgcaacggttggggtggctgtggtggtggtccatacgctctccagacctgccgcccaaccaagaccagcacttccacagtgctcgacacctacatcaacgaaagccgcattgaccgccgcccagcgaagggtgactggtgtaaccagaacggtgccggtatcggtaagctccccggcccgggtactggcccttaccaatggtatgtttgggtcaagccccccggtgaatccgatggctccagcgtcttgatcccagttggccccgataacccagatggcaaaggcctcgacggtatgtgcgacccgaactacatgggtaacagcctgaacgagaaccagaactccaacgctctgcccaatgctccactctctggtaaatggttccaagctcagttcgatcaactggtcgccaacaagtacccctaa

SEQ ID NO: 350 - protein, 819 aa, Unknown
  Obtained from environmental sample
MSTLKVKQVSLVLTILAVLVATFMGFTQKSARAAAICSPATAVPVPFTKDGVGDVCVQTTSLCSYINSWNTTTIEVNGTSYTNLYTAASSIPAVNGTYTIHYVSTVGWGHFEMGGTCASGPTSTSAPATNTTVAPTLTRTNTVAAPTNTAVGPTATRTSTTVAPTATTVAPTATSVPATSTPTSGGTLKVQLVGGGTDNTQQTAFNLLVVNTGTSAVSNISARIYFTTENSNAASSYVLEKYYDQSGVSTVSGPTLASGSTYYYTVNFGTASLPAGGNWAYNTAMHLSSWASTYSATNDFWHGTGTLPASFTNWSSVPLYVNGSLVWGSEPGGVVNPTNTAVGPTATRTNTLVAPTATTTGPTATKTNTPVGPTATRTSTPVGPTATKTSTPVGPTPTNSPPGTHLANPFIGAQFYINHDWQGSATFPNVNTFLWMDSIAAVNGTGAYARSLAGHLDLALAQGANAVSLVIYDLPNRDCSALSSNGELLQANNGSARYRTEYIDNIYNILSQPKYAGLRFIAVIEPDSLPNLITNTSIAKCQEATSPTDGYVANTTYTLNKFYNLRNFYSYIDVGHAGWLGWPNNMTPFVTLVSNMVKGTTHGVNSIDGFIDNTANTQVEVETFLDAATIVGGNPVRSGSFFDWNDYIDESHYAAALKAAFQAAGLPASSTNFLIDTSRNGWGGCGGGPYALQTCRPTKTSTSTVLDTYINESRIDRRPAKGDWCNQNGAGIGKLPGPGTGPYQWYVWVKPPGESDGSSVLIPVGPDNPDGKGLDGMCDPNYMGNSLNENQNSNALPNAPLSGKWFQAQFDQLVANKYP

SEQ ID NO: 351 - DNA, 2118 bp, Unknown
  Obtained from environmental sample
atgaaccccctgaaatccttgataagttgcagtccaggcctgctaggcctttttttgttaggcggtatccacgtggcgaacgcgcaatcagcctcttgtgtttaccaaattactaatgaatggaataccgggtacacaggtgcgattgttatcaccaataatagcaacaccactatcaacgattggagtgttaattggcagtataatagcaaccgcctcaccggcagttggaacgccaacctcgcgggtagcaatccctacactgccacaaacctttcctggaatgcgcaaattcctcccgggcaacgtgtcgaatttggttttcaggtaaacaaaaatggcggagctgcagagcggcccaatgtgaatggcagcatctgtggtacagcatcttcaagcagttcttctgtaagcagcagctcttctgtaagctcatcaagcagttcggccccgagtagctgtcctgcgcaacaatgtaactggtacggctcagttcaccctctgtgcgtaaccacccagaacggctgggggtgggagcagaatcgcagctgtatctctcgcactacatgcagcagccagcccgcaccttttggaattaccggcagctgcccaagcagctcgagctcatcttctctctcctcatctgttagcagctcaagctcctcagtcagtagcagctcttccattagtagcagtctttcttcaagcagctcttcgagctcatcttcgagctcatcttcgagctcatcttcgagttcatcttcgagttcatcttcgagttcatcttcgagttcatcttcgagttcatcgtccagcagttcctcttcgataacatccagcagctcctccagcagcagtcctgcagattggagcaaccgcctcagcaatccatttgtcgacgcgcgctggtacgtgaatcaggattgggcagccaacgcgaccgcatccggcggtgcagccattgccaatgtgagtacggcggtgtggatggatcgcatcggggcgattaatccaccggaacccaacgcaatgggcctgcgtgaccatatgaacgcggcattggatcagggagcaaacctgatcaaggtggtgatctacgacctgccaaaccgcgattgccatgccttggcttccaacggtgagctcttgattcgtgaaaatggttttaatcgttacgtgaatgaatacattggtccgatcgtggatattttctctgatcccgcctaccgcaacctgcgcatcatcgccattatcgaaccggattcgctacctaatctggtcaccaacatcagcacacccgcgtgccaggaagctgccgggcccggaggatatatcgacggcacccgccatacactcactcaactcggccgtctacccaatgtgtacagttatgtagatattggacattcgggctggttgggctgggatgaaaactttactcaggcctcaactttgatcgccaacgctatcaaaggcgcagagaaaggtgtaaatagtgtggccggatttgtttccaatacgtcgggttacacaccgttacgcgagccattccttgacgccttggcaaactccaccatgtctggtggcggcaaccaaatccgctctgcgaccttctacgagtggaatccctacttcagcgaggtgagttttgtgcaggcgtggcgtaatcgcatgattcaacttggcttccccagcagtattggtatgttgatcgatacttcacgtaacggttggggcggccccaaccgtccaacggcggcatcaaccagtacagtgctggaaacttttgtgaacgaatcacgaattgatcgccgataccacagaggcaactggtgtaatcaatttggcggaattggtgagcgccccagggtatcgcctgaacctggtatccatgcttatgtatgggttaaaccaccaggggagtccgatggtgtaggacgcgcgggagtcattgacccagtcgactccaacaaaggattcgaccgcttctgcgatccaacatttaccacggtgaatggaacactcaccggatcaattcccgacgcaccccacgccgggcgctggcaccacgaagctttccagatactgttgcagaacgcctatccgcctttgcaataa

SEQ ID NO: 352 - protein, 705 aa, Unknown
  Obtained from environmental sample
MNPLKSLISCSPGLLGLFLLGGIHVANAQSASCVYQITNEWNTGYTGAIVITNNSNTTINDWSVNWQYNSNRLTGSWNANLAGSNPYTATNLSWNAQIPPGQRVEFGFQVNKNGGAAERPNVNGSICGTASSSSSSVSSSSSVSSSSSSAPSSCPAQQCNWYGSVHPLCVTTQNGWGWEQNRSCISRTTCSSQPAPFGITGSCPSSSSSSSLSSSVSSSSSSVSSSSSISSSLSSSSSSSSSSSSSSSSSSSSSSSSSSSSSSSSSSSSSSSSSSSITSSSSSSSSPADWSNRLSNPFVDARWYVNQDWAANATASGGAAIANVSTAVWMDRIGAINPPEPNAMGLRDHMNAALDQGANLIKVVIYDLPNRDCHALASNGELLIRENGFNRYVNEYIGPIVDIFSDPAYRNLRIIAIIEPDSLPNLVTNISTPACQEAAGPGGYIDGTRHTLTQLGRLPNVYSYVDIGHSGWLGWDENFTQASTLIANAIKGAEKGVNSVAGFVSNTSGYTPLREPFLDALANSTMSGGGNQIRSATFYEWNPYFSEVSFVQAWRNRMIQLGFPSSIGMLIDTSRNGWGGPNRPTAASTSTVLETFVNESRIDRRYHRGNWCNQFGGIGERPRVSPEPGIHAYVWVKPPGESDGVGRAGVIDPVDSNKGFDRFCDPTFTTVNGTLTGSIPDAPHAGRWHHEAFQILLQNAYPPLQ

SEQ ID NO: 353 - DNA, 1383 bp, Unknown
  Obtained from environmental sample
atgtttactcgaaattgtttgcacgctattttaattgttggcctgctttctgcctgtggaggccaggacaaaagtgatcgtcgtcagggaaccagccgcatttcatcgctaactattggcaagtttaacccaaatggtgacaacccacagtggtcgactttgaaactggcaatggaaaatatcgatcagggagctttgtttcttgaaagaacctatagcatcagtgatttttccagtgatttggcagaggatctgcttgtcaaagttccttttggtcgctatcgactgaacttgttatattatagtcaacagggaaatttgctctatcagtcatgtccagaagagattcagcgggaacacgtaatcgatactgctcgctatagggcggatatagccatctgccgcgaatctagtgatgaaccggtaggtcaggtcccaattgaaccggtaagtgaggttatcatcagtccgcagcccgatcgaacgggtgaaaacggcggaaatgcaccaggccaggagggtggaaatttctggattgatcccgattcccaggcgatgcttgatttcaggcaaatgcaacagtccggacacccagatgctcgctatattgagtatattgccaagcagccagcggctgtgtggtatggcgagtggagcggaaatatttctcaagccgttcgtcagcatatcgccggtgcgaatgcgcataatgcctacgcactcatgattgcttacaaaattcctgagcgggattgtggacagcattcatcaggtgggctgagagcagacgcttatcgaaattggattcgggattttgcaaacgctattggctcggcaaaggcaattgttgtgctagaacctgatgctcttactttgatggagtgtctggatagtgacggcgtagcgctgagatacgagctactcaattttgccctcgcccagtttaagtcaaagcccaatacccgggtctacattgatgcaggacactccgcatggctgtccgcgcaagaactggcagatcggctaagactggctggcattagccgtgccgatggtttttctttgaacacatcgaattatcaaacgaccgaatcgaatattcgctacggccaggaagtccgcaacttgctgggtggtggtatcaacttcatcgtcgataccagtcgtaatggcaacggaccaactcctgacgccgaatggtgtaatccgcgagggcgggccttgggtcaaacaccaactttcagtacaggcgttaccggtgttgacgcatatttgtggctaaaacgtccgggcgagtctgatggctattgtaatggtggtcctgcagccggtgcctggtggcgggaattggctatcgaatatgcaaaaaacgccggtatctaa

SEQ ID NO: 354 - protein, 460 aa, Unknown
  Obtained from environmental sample
  DOMAIN (179)...(449): Glycosyl hydrolases family 6
  SITE (224)...(227): N-glycosylation site. Prosite id = PS00001
  SITE (361)...(364): N-glycosylation site. Prosite id = PS00001
MFTRNCLHAILIVGLLSACGGQDKSDRRQGTSRISSLTIGKFNPNGDNPQWSTLKLAMENIDQGALFLERTYSISDFSSDLAEDLLVKVPFGRYRLNLLYYSQQGNLLYQSCPEEIQREHVIDTARYRADIAICRESSDEPVGQVPIEPVSEVIISPQPDRTGENGGNAPGQEGGNFWIDPDSQAMLDFRQMQQSGHPDARYIEYIAKQPAAVWYGEWSGNISQAVRQHIAGANAHNAYALMIAYKIPERDCGQHSSGGLRADAYRNWIRDFANAIGSAKAIVVLEPDALTLMECLDSDGVALRYELLNFALAQFKSKPNTRVYIDAGHSAWLSAQELADRLRLAGISRADGFSLNTSNYQTTESNIRYGQEVRNLLGGGINFIVDTSRNGNGPTPDAEWCNPRGRALGQTPTFSTGVTGVDAYLWLKRPGESDGYCNGGPAAGAWWRELAIEYAKNAGI

SEQ ID NO: 355 - DNA, 1359 bp, Unknown
  Obtained from environmental sample
atgtatcaacgcgcactccttttctctgccttgatggcaggggctactgcccagcaagtcggcacacagaaggcggaaagccatccacctttgacctggcaggaatgcacttcttctggttgtacggacaagaatggcgcggtcgttgtggatgccaattggcgctgggttcactcggttgatggcaccaccaactgctacactggcaacacgtgggatgccactctttgccctgacgatgccagctgcgctaccaactgcgccgtcgacggtgcggactacgctggcacctacggtgctactacctctggcaatgctctgaccttggactttgtcaccggctccaacatcgggtcccgcatgtatctcatggaggatgacaacacctaccagatgttcaagttgctgggccaggagttcacctttgacgtggatgtttccaacctcccctgcggcttgaacggcgctctgtactttgtctccatggacgctgatggcggtctgtccaagtacgagaacaacaaggctggcgctaagtacggtactgggtactgtgatagccagtgccctcgtgacttgaagttcatcaatggccagggcaacgttgagggatgggtcccctcttccaacgacaagaacgctggtgttggcaaccacggctcttgctgtgctgagatggatatctgggaggccaacagcatctccactgctctgaccccgcacccctgtgacaccgccagccagactatgtgcgaggccgatgcgtgcggcggcacctactctagctctcgctacgccggcacctgcgatcccgatggctgcgacttcaaccccttccgtatgggcaacgagaccttctttggccctggcaagactgtcgacaccaagtctaagatgaccgttgtcacccagttcatcaccagcgacggcagcaccaccggcactctgtcagagatcaagcgtatctacgtgcagaacggcaaggtgattgccaactcggcctcggacgtcagcggtgttaccggcaactcgatcacctcggacttctgcactgcgcagaagactgcctttggcgaccaggacatcttctccaagcatggcggtctctctggtatgggcgatgctctggctaagggcatggttctggttatgagcttgtgggatgaccactatgccgatatgctctggctcgacagcaactaccccaccaatgcttctgccactgcccccggtgttgcccgtggtacttgcagcactgactcgggcaagcctgacactgttgagtctgagtctgcttctgccaaggtcatcttctccaacatcaaggttggccccattggctctacatactctgcctaa

SEQ ID NO: 356 - protein, 452 aa, Unknown
  Obtained from environmental sample
  SIGNAL (1)...(17)
  DOMAIN (19)...(452): Glycosyl hydrolase family 7
  SITE (287)...(290): N-glycosylation site. Prosite id = PS00001
  SITE (410)...(413): N-glycosylation site. Prosite id = PS00001
MYQRALLFSALMAGATAQQVGTQKAESHPPLTWQECTSSGCTDKNGAVVVDANWRWVHSVDGTTNCYTGNTWDATLCPDDASCATNCAVDGADYAGTYGATTSGNALTLDFVTGSNIGSRMYLMEDDNTYQMFKLLGQEFTFDVDVSNLPCGLNGALYFVSMDADGGLSKYENNKAGAKYGTGYCDSQCPRDLKFINGQGNVEGWVPSSNDKNAGVGNHGSCCAEMDIWEANSISTALTPHPCDTASQTMCEADACGGTYSSSRYAGTCDPDGCDFNPFRMGNETFFGPGKTVDTKSKMTVVTQFITSDGSTTGTLSEIKRIYVQNGKVIANSASDVSGVTGNSITSDFCTAQKTAFGDQDIFSKHGGLSGMGDALAKGMVLVMSLWDDHYADMLWLDSNYPTNASATAPGVARGTCSTDSGKPDTVESESASAKVIFSNIKVGPIGSTYSA

SEQ ID NO: 357 - DNA, 1419 bp, Unknown
  Obtained from environmental sample
atggttgtaggcattcttgcgactctggccacgctggccacactggcagctagcgttccccttgaggaacgacagtcttgctcaagtgtttggggtcaatgtggtggccaaaactgggctggaccgttctgctgtgcttccggaagcacttgtgtgtattccaatgactactactctcagtgtcttcctggcacggcaagctcaagttcttccactcgcgcctcgtcgacaacttctcgggtgtcgtcagcaacatcgactagatcaagctcttcaacgccccctcctgcctcttcaactacaccagcgccgccagtcggatcgggaacggcaacatactccggtaacccctttgctggagttacgccttgggccaattccttttatgcctctgaagtcagcactttggcaattccaagcttgacaggagctatggccactgctgcggccgctgtggcaaaggtgccgtctttcatgtggctagacactctggataagactcctttgatgagctcgacgttgtcggacatccgtgccgcaaacaaggccggcggcaactacgctggacaatttgtcgtctacgacctgccagaccgtgactgtgccgccgctgcttctaatggtgaatattccatcgctgatggtggcgtggccaaatacaagaactatatcgatactattcgtggaatcgtcaccaccttttccgacgttcgcatacttttggttatcgagcccgactcccttgcgaacctggttactaacctcgccactccgaagtgctcaaacgcccaatctgcatacctggagtgcattaattacgcaatcacgcagctaaatcttcccaatgttgcgatgtacttggatgctggccacgctggatggcttggatggccagcaaatcaagacccagctgcccagttgtttgcaaatgtttacaagaacgcgtcatctcctcgagccgtccgtggactggccactaacgtggctaactacaatgcgtggaacattactaccccaccttcatacactcaaggaaacgctgtttacaatgagaagctgtatattcacgccctcggaccccttcttgccaaccatggctggtcaaacgctttcttcatcactgaccaaggccgatctggcaagcagccaaccgggcagcttgagtggggtaactggtgcaatgctgttggcactggatttggtatccgtccttctgccaacactggcgactcactgttggattcattcgtctggatcaagccaggtggcgagtgtgatggtactagcaacagcagtgcaccgcggtttgattatcactgtgcttctgcagatgctttgcagccagcacctcaagccggttcttggttccaggcttatttcgtgcagcttcttacgaacgcgaacccgtcattcctgtag

SEQ ID NO: 358 - protein, 472 aa, Unknown
  Obtained from environmental sample
  SIGNAL (1)...(16)
  DOMAIN (30)...(58): Fungal cellulose binding domain
  DOMAIN (125)...(438): Glycosyl hydrolases family 6
  SITE (34)...(61): Cellulose-binding domain, fungal type. Prosite id = PS00562
  SITE (243)...(252): Glycosyl hydrolases family 6 signature 2. Prosite id = PS00656
  SITE (318)...(321): N-glycosylation site. Prosite id = PS00001
  SITE (340)...(343): N-glycosylation site. Prosite id = PS00001
  SITE (436)...(439): N-glycosylation site. Prosite id = PS00001
MVVGILATLATLATLAASVPLEERQSCSSVWGQCGGQNWAGPFCCASGSTCVYSNDYYSQCLPGTASSSSSTRASSTTSRVSSATSTRSSSSTPPPASSTTPAPPVGSGTATYSGNPFAGVTPWANSFYASEVSTLAIPSLTGAMATAAAAVAKVPSFMWLDTLDKTPLMSSTLSDIRAANKAGGNYAGQFVVYDLPDRDCAAAASNGEYSIADGGVAKYKNYIDTIRGIVTTFSDVRILLVIEPDSLANLVTNLATPKCSNAQSAYLECINYAITQLNLPNVAMYLDAGHAGWLGWPANQDPAAQLFANVYKNASSPRAVRGLATNVANYNAWNITTPPSYTQGNAVYNEKLYIHALGPLLANHGWSNAFFITDQGRSGKQPTGQLEWGNWCNAVGTGFGIRPSANTGDSLLDSFVWIKPGGECDGTSNSSAPRFDYHCASADALQPAPQAGSWFQAYFVQLLTNANPSFL

SEQ ID NO: 359 - DNA, 1590 bp, Unknown
  Obtained from environmental sample
atgtctgccttgaactctttcaatatgtacaagagcgccctcatcttgggctccttgctggcaacagctggtgctcagcaaattggtacttataccgctgaaacccatccctctttgagctggtctacttgcaaatcgggtggtagctgcaccacaaactccggtgccattacgttggatgccaactggcgttgggtccatggtgtcaataccagcaccaactgctacactggcaacacttggaataccgccatctgcgacactgatgcatcctgtgcccaggactgtgctcttgatggtgctgactactctggcacgtacggtatcactacctccggcaactcattgcgcctgaacttcgttaccggttccaacgtcggatctcgtacctacctgatggccgataacacccactaccaaatcttcgacttgttgaaccaggagttcactttcaccgtcgatgtctcccacctcccttgcggtttgaacggtgccctctacttcgtgaccatggacgccgacggtggcgtctccaagtaccccaacaacaaggccggcgctcagtacggtgttggatactgtgactctcaatgccctcgtgacttgaaattcatcgctggtcaggccaacgttgagggctggacgccctcctccaacaacgccaacactggacttggcaaccacggagcttgctgcgcagagcttgatatctgggaggcaaacagcatctcagaggctttgactcctcacccttgcgatacacccggtctatctgtttgcactactgatgcctgcggtggtacctacagctccgatcgttacgccggtacctgcgaccctgatggatgtgacttcaacccttaccgtcttggtgtcactgacttctacggctccggcaagaccgttgacaccaccaaacccatcaccgttgtgactcaattcgtcactgacgacggcacatccaccggcaccctctccgagatcagacgttactacgttcagaacggtgttgtcatcccccagccttcctccaagatctccggagtcagcggaaatgtcatcaactccgacttctgcgatgctgagatctccacctttggcgagactgcctccttcagcaaacacggtggcctggcaaagatgggcgctggtatggaagctggtatggtcttggtcatgagtttgtgggacgactactccgtcaacatgctctggctcgacagcacctaccctacaaacgcgactggtacccccggtgccgctcgtggttcctgccctaccacttctggggaccctaagaccgttgaatcacaatccggcagctcctatgtcaccttttctgacatccgggttggtcctttcaactctacgttcagcggtggttctagcaccggtggcagctccactactaccgccagcggcaccaccaccaccaaggcctcttccacctctacttccagcacctctaccggcactggagtcgctgctcactggggtcagtgtggtggccagggttggactggtcctaccacctgcgctagtggaaccacatgcaccgtcgtgaacccttactactctcaatgtttgtag

SEQ ID NO: 360 - protein, 529 aa, Unknown
  Obtained from environmental sample
  DOMAIN (27)...(460): Glycosyl hydrolase family 7
  DOMAIN (497)...(525): Fungal cellulose binding domain
  SITE (71)...(74): N-glycosylation site. Prosite id = PS00001
  SITE (419)...(422): N-glycosylation site. Prosite id = PS00001
  SITE (461)...(464): N-glycosylation site. Prosite id = PS00001
MSALNSFNMYKSALILGSLLATAGAQQIGTYTAETHPSLSWSTCKSGGSCTTNSGAITLDANWRWVHGVNTSTNCYTGNTWNTAICDTDASCAQDCALDGADYSGTYGITTSGNSLRLNFVTGSNVGSRTYLMADNTHYQIFDLLNQEFTFTVDVSHLPCGLNGALYFVTMDADGGVSKYPNNKAGAQYGVGYCDSQCPRDLKFIAGQANVEGWTPSSNNANTGLGNHGACCAELDIWEANSISEALTPHPCDTPGLSVCTTDACGGTYSSDRYAGTCDPDGCDFNPYRLGVTDFYGSGKTVDTTKPITVVTQFVTDDGTSTGTLSEIRRYYVQNGVVIPQPSSKISGVSGNVINSDFCDAEISTFGETASFSKHGGLAKMGAGMEAGMVLVMSLWDDYSVNMLWLDSTYPTNATGTPGAARGSCPTTSGDPKTVESQSGSSYVTFSDIRVGPFNSTFSGGSSTGGSSTTTASGTTTTKASSTSTSSTSTGTGVAAHWGQCGGQGWTGPTTCASGTTCTVVNPYYSQCL

SEQ ID NO: 361 - DNA, 2220 bp, Clostridium thermocellum ATCC 27405
atgaagaaaattttggcgtttttgctgacagttgcgctggtggcagtagtggccattccacaagccgtggtaagttttgctgcggatttcaactatggtgaggcacttcagaaagcaataatgttttatgagttccagcgctcgggaaaactgcccgaaaacaaaagaaacaactggcgtggagattccgctcttaatgacggcgcagacaacggtttggaccttacaggcggttggtatgatgccggtgaccatgtaaagttcaaccttccgatggcctatgccgttaccatgctcgcatggagtgtttatgaatcccgggatgcgtatgtacaaagcggacagcttccttacatactggacaatattaaatgggctaccgactactttataaaatgccatccaagtccaaatgtatattattatcaggtgggagacggagcattggaccattcatggtggggacctgctgaagtaatgcagatgccaagaccgtccttcaaagtggatttgaccaatccgggttcgactgtggttgctgagacggcagcggctatggctgcatcctcaattgttttcaagcctacagacccggaatatgctgccacacttttaaggcatgcgaaagaactctttacttttgccgacaccacaagaagtgacgcaggatatagagcggcagagggatactattcatcccacagcggtttttatgatgaacttacctgggcgagtatatggctgtatcttgcaacaggagaccagtcttatcttgataaagcagaatcctatgaacctcattgggaaagggaaagaggtacaactttaattagttattcctgggctcattgctgggataacaaattgtacggttctttgcttttgttagcaaaaattaccggcaagtcttattacaagcaatgtattgaaaaccatcttgactattggaccgtcggatttaacggaagcagagttcaatatactccaaaaggactcgcatatcttgacagatggggttcattgagatatgcaaccacacaggcgttccttgccagcgtttatgcggactggtccggctgtgacccggctaaggcggctgtctacaaggaatttgcaaaaaaacaggtggattatgcattaggaagcacaggaagaagctttgtagtaggttttggaaaaaatccgccaagaaatcctcaccacaggacggcccacagctcatggagcgctttaatgaccgaacctgcggagtgcagacatattctggtgggtgcattggttggcggaccggacggttcggattcatatgttgacaggctcgatgattatcagtgcaatgaggtggccaacgactataatgctggatttgtaggtgctcttgccaagatgtatgagaagtatggcggagaaccgattccgaatttcgttgcttttgaaacaccgggggaagaattttatgttgaagctgcggtaaatgctgcaggacccggttttgtaaatatcaaagcttcaataatcaacaagtccggttggccggcaagaggttcagataaattgtcagccaagtattttgtcgatatttccgaagctgttgcaaaaggcattactttggatcaaattaccgttcagtcgactactaatggcggagccaaggtttcacagcttcttccgtgggatccggacaatcatatttattatgtaaacattgactttacgggaataaacatattccccggaggaataaatgaatacaagagggatgtatatttcactattacggcgccgtatggagagggtaactgggacaataccaacgacttctccttccagggacttgagcagggctttacaagcaaaaagactgaatatataccgttgtatgacggtaatgtgagagtatggggtaaagtaccggacggaggttcggagcccgatccgacgccgacaatcaccgttggccccactccttcggttacaccgacatcagtacctggaataatgctcggagatgtgaattttgacggaagaataaactcgacggattattcacgcttaaaaagatatgtaataaagtctttggaattcacagatcctgaagagcaccagaagttcattgcagctgcggatgttgacgggaacggaagaataaactccacagatttgtatgtgctcaacaggtacatattaaaacttattgaaaaattcccggctgaacagtaa

SEQ ID NO: 362 - protein, 739 aa, Clostridium thermocellum ATCC 27405
  SIGNAL (1)...(27)
  DOMAIN (31)...(463): Glycosyl hydrolase family 9
  DOMAIN (485)...(570): Cellulose binding domain
  DOMAIN (670)...(690): Dockerin type I repeat
  DOMAIN (709)...(729): Dockerin type I repeat
  SITE (325)...(328): N-glycosylation site. Prosite id = PS00001
  SITE (442)...(460): Glycosyl hydrolases family 9 active sites signature 2. Prosite id = PS00698
  SITE (514)...(517): N-glycosylation site. Prosite id = PS00001
  SITE (680)...(699): Clostridium cellulosome enzymes repeated domain signature. Prosite id = PS00448
  SITE (688)...(691): N-glycosylation site. Prosite id = PS00001
  SITE (728)...(731): N-glycosylation site. Prosite id = PS00001
MKKILAFLLTVALVAVVAIPQAVVSFAADFNYGEALQKAIMFYEFQRSGKLPENKRNNWRGDSALNDGADNGLDLTGGWYDAGDHVKFNLPMAYAVTMLAWSVYESRDAYVQSGQLPYILDNIKWATDYFIKCHPSPNVYYYQVGDGALDHSWWGPAEVMQMPRPSFKVDLTNPGSTVVAETAAAMAASSIVFKPTDPEYAATLLRHAKELFTFADTTRSDAGYRAAEGYYSSHSGFYDELTWASIWLYLATGDQSYLDKAESYEPHWERERGTTLISYSWAHCWDNKLYGSLLLLAKITGKSYYKQCIENHLDYWTVGFNGSRVQYTPKGLAYLDRWGSLRYATTQAFLASVYADWSGCDPAKAAVYKEFAKKQVDYALGSTGRSFVVGFGKNPPRNPHHRTAHSSWSALMTEPAECRHILVGALVGGPDGSDSYVDRLDDYQCNEVANDYNAGFVGALAKMYEKYGGEPIPNFVAFETPGEEFYVEAAVNAAGPGFVNIKASIINKSGWPARGSDKLSAKYFVDISEAVAKGITLDQITVQSTTNGGAKVSQLLPWDPDNHIYYVNIDFTGINIFPGGINEYKRDVYFTITAPYGEGNWDNTNDFSFQGLEQGFTSKKTEYIPLYDGNVRVWGKVPDGGSEPDPTPTITVGPTPSVTPTSVPGIMLGDVNFDGRINSTDYSRLKRYVIKSLEFTDPEEHQKFIAAADVDGNGRINSTDLYVLNRYILKLIEKFPAEQ

SEQ ID NO: 363 - DNA, 1455 bp, Clostridium thermocellum ATCC 27405
atgaaaaaaataccgttacttatgctgctgtcagcaataatatttttatctttacatcccacactgtcgtatgcacaggacgactctcttccgacaaaaaggatagtaggctactttgctgaatggaatatatatcttgaaaacaattattatgaagtttcagatattccatgggatatggtaacgcatataaattatgcctttgccaaaattgaaaatggaaggatagcaattattgataaatgggctgcgatccaaaagccttttggcgacgatacctgggatacaccgataagaggccattttggacaactgataaagtacaaagaacagtatccgcatgtaaaaactctgatttcagtgggaggctggaccgaatccaaatatttttcggatgttgcattaacggaagaatcaagaaatacatttgcggacagttgtgttgagttcattcgtacataccggtttgatggagtggatattgactgggaatatcctgtgagcggcggaatgccggaaaatattagaaggccggaggacaagcaaaactttactcttttgttaaaatgtcttagagaaaaacttgatgccgcaggtgctgaagacggaaagcactaccttcttacaatagccgcaccggcgggaagctttaacataaaaaacaccgagcctgagatttatcatcaatacctggattttatcaatattatgacttatgattacagtggctcatgggaaaatgtggcgaatcatttggctccattgtatatgaatccaaacgacccgtcctatcctgaaagaaaagagaaattcaatgtggattggacggtaaaggaatacttaagacttggtgttcccgcggaaaaaataaatgtgggagtaccgtattacgcagcaggatggcaggaagttaacggcggtataaacggacttttcggaacgtcatcaaaaccgctcagcagtactcagttccactatataaatagtttgcttaagtcaccggacttaggttttacaagatactgggacgagtatgcaatggttccctatctgtggaatcctgaaagtgcaacgttctacagctatgaagatgaaatttcccttaaaaataaatgtgattatgtcattgaaaacaatcttggaggaataatgatttgggaattgagcggggattacccggcggaaggaggaactactttgacatctgttatatacgacagttttacatcattcaaagatgaaatttacggtgatttaaacggtgacggaaaagttaattcaagcgatcttgcaattttaaaaagatatatgctgagggccataagtgattttccgattccggaaggcaggaaacttgctgatttgaacagggacggcaatgttaattccactgattattcgattcttaaaaggtatatactgaaagctattgacaatatacctgttgatgattga

SEQ ID NO: 364 - protein, 484 aa, Clostridium thermocellum ATCC 27405
  SIGNAL (1)...(25)
  DOMAIN (33)...(391): Glycosyl hydrolases family 18
  DOMAIN (418)...(438): Dockerin type I repeat
  DOMAIN (454)...(474): Dockerin type I repeat
  SITE (158)...(166): Chitinases family 18 active site. Prosite id = PS01095
  SITE (185)...(188): N-glycosylation site. Prosite id = PS00001
  SITE (424)...(443): Clostridium cellulosome enzymes repeated domain signature. Prosite id = PS00448
  SITE (424)...(436): EF-hand calcium-binding domain. Prosite id = PS00018
  SITE (432)...(435): N-glycosylation site. Prosite id = PS00001
  SITE (469)...(472): N-glycosylation site. Prosite id = PS00001
MKKIPLLMLLSAIIFLSLHPTLSYAQDDSLPTKRIVGYFAEWNIYLENNYYEVSDIPWDMVTHINYAFAKIENGRIAIIDKWAAIQKPFGDDTWDTPIRGHFGQLIKYKEQYPHVKTLISVGGWTESKYFSDVALTEESRNTFADSCVEFIRTYRFDGVDIDWEYPVSGGMPENIRRPEDKQNFTLLLKCLREKLDAAGAEDGKHYLLTIAAPAGSFNIKNTEPEIYHQYLDFINIMTYDYSGSWENVANHLAPLYMNPNDPSYPERKEKFNVDWTVKEYLRLGVPAEKINVGVPYYAAGWQEVNGGINGLFGTSSKPLSSTQFHYINSLLKSPDLGFTRYWDEYAMVPYLWNPESATFYSYEDEISLKNKCDYVIENNLGGIMIWELSGDYPAEGGTTLTSVIYDSFTSFKDEIYGDLNGDGKVNSSDLAILKRYMLRAISDFPIPEGRKLADLNRDGNVNSTDYSILKRYILKAIDNIPVDD

SEQ ID NO: 365 - DNA, 1401 bp, Clostridium thermocellum ATCC 27405
ttgctgattcttgcagtgttgggggtttatatgttggcaatgccggcaaacactgtgtcagcggcaggtgtgccttttaacacaaaatacccctatggtcctacttctattgccgataatcagtcggaagtaactgcaatgctcaaagcagaatgggaagactggaagagcaagagaattacctcgaacggtgcaggaggatacaagagagtacagcgtgatgcttccaccaattatgatacggtatccgaaggtatgggatacggacttcttttggcggtttgctttaacgaacaggctttgtttgacgatttataccgttacgtaaaatctcatttcaatggaaacggacttatgcactggcacattgatgccaacaacaatgttacaagtcatgacggcggcgacggtgcggcaaccgatgctgatgaggatattgcacttgcgctcatatttgcggacaagttatggggttcttccggtgcaataaactacgggcaggaagcaaggacattgataaacaatctttacaaccattgtgtagagcatggatcctatgtattaaagcccggtgacagatggggaggttcatcagtaacaaacccgtcatattttgcgcctgcatggtacaaagtgtatgctcaatatacaggagacacaagatggaatcaagtggcggacaagtgttaccaaattgttgaagaagttaagaaatacaacaacggaaccggccttgttcctgactggtgtactgcaagcggaactccggcaagcggtcagagttacgactacaaatatgatgctacacgttacggctggagaactgccgtggactattcatggtttggtgaccagagagcaaaggcaaactgcgatatgctgaccaaattctttgccagagacggggcaaaaggaatcgttgacggatacacaattcaaggttcaaaaattagcaacaatcacaacgcatcatttataggacctgttgcggcagcaagtatgacaggttacgatttgaactttgcaaaggaactttatagggagactgttgctgtaaaggacagtgaatattacggatattacggaaacagcttgagactgctcactttgttgtacataacaggaaacttcccgaatcctttgagtgacctttccggccaaccgacaccaccgtcgaatccgacaccttcattgcctcctcaggttgtttacggtgatgtaaatggcgacggtaatgttaactccactgatttgactatgttaaaaagatatctgctgaagagtgttaccaatataaacagagaggctgcagacgttaatcgtgacggtgcgattaactcctctgacatgactatattaaagagatatctgataaagagcataccccacctaccttattag

SEQ ID NO: 366 - protein, 466 aa, Clostridium thermocellum ATCC 27405
  SIGNAL (1)...(21)
  DOMAIN (22)...(375): Glycosyl hydrolases family 8
  DOMAIN (406)...(426): Dockerin type I repeat
  DOMAIN (438)...(458): Dockerin type I repeat
  SITE (40)...(43): N-glycosylation site. Prosite id = PS00001
  SITE (129)...(132): N-glycosylation site. Prosite id = PS00001
  SITE (141)...(159): Glycosyl hydrolases family 8 signature. Prosite id = PS00812
  SITE (244)...(247): N-glycosylation site. Prosite id = PS00001
  SITE (326)...(329): N-glycosylation site. Prosite id = PS00001
  SITE (412)...(424): EF-hand calcium-binding domain. Prosite id = PS00018
  SITE (412)...(431): Clostridium cellulosome enzymes repeated domain signature. Prosite id = PS00448
  SITE (420)...(423): N-glycosylation site. Prosite id = PS00001
  SITE (444)...(456): EF-hand calcium-binding domain. Prosite id = PS00018
  SITE (452)...(455): N-glycosylation site. Prosite id = PS00001
MLILAVLGVYMLAMPANTVSAAGVPFNTKYPYGPTSIADNQSEVTAMLKAEWEDWKSKRITSNGAGGYKRVQRDASTNYDTVSEGMGYGLLLAVCFNEQALFDDLYRYVKSHFNGNGLMHWHIDANNNVTSHDGGDGAATDADEDIALALIFADKLWGSSGAINYGQEARTLINNLYNHCVEHGSYVLKPGDRWGGSSVTNPSYFAPAWYKVYAQYTGDTRWNQVADKCYQIVEEVKKYNNGTGLVPDWCTASGTPASGQSYDYKYDATRYGWRTAVDYSWFGDQRAKANCDMLTKFFARDGAKGIVDGYTIQGSKISNNHNASFIGPVAAASMTGYDLNFAKELYRETVAVKDSEYYGYYGNSLRLLTLLYITGNFPNPLSDLSGQPTPPSNPTPSLPPQVVYGDVNGDGNVNSTDLTMLKRYLLKSVTNINREAADVNRDGAINSSDMTILKRYLIKSIPHLPY

SEQ ID NO: 367 - DNA, 1755 bp, Unknown; identical to SEQ ID NO: 151
  Obtained from environmental sample

SEQ ID NO: 368 - protein, 584 aa, Unknown; identical to SEQ ID NO: 152
  Obtained from environmental sample
  SIGNAL (1)...(32)
  DOMAIN (28)...(126): N-terminal ig-like domain of cellulase
  DOMAIN (134)...(576): Glycosyl hydrolase family 9
  SITE (457)...(460): N-glycosylation site. Prosite id = PS00001
  SITE (500)...(516): Glycosyl hydrolases family 9 active sites signature 1. Prosite id = PS00592
  SITE (557)...(575): Glycosyl hydrolases family 9 active sites signature 2. Prosite id = PS00698

SEQ ID NO: 369 - DNA, 1631 bp, Unknown
  Fungal DNA
atgtaccgcattctagccaccgcctcggctctgctggcaaccgcccgtgcccagcaagcctgcaccctcaacgccgaaagcaagcctgccttgacctggtccaagtgcacatccagcggctgcaacaacgtccgcggatccgtcgtggttgacgccaactggcgatggacccatagcacctccagcagcaccaactgctacagcggcaacacctgggacaagactctctgccccgatggaaagacctgcgctgacaagtgctgtcttgatggtgccgactactctggcacctacggagtcacctcgagcggcagccagctcaacctcaagttcgtgactgttggaccgtacagcaccaatgtcggcagccgtctctatctcatggaggatgagaacaactaccagatgttcgacctcctgggcaacgaattcacctttgatgtcgatgtcaacaacatcggatgcggcctgaacggcgccctctacttcgtctccatggacaaggatggtggcaagagccgcttcagcaccaacaaggctggtgccaagtacggaactggatactgcgatgcccagtgccctcgcgatgtcaagttcatcaacggagttgtaagtatctcgagttctcagtcttcaggggtagttactgacaagtatcaaaggccaactccgacgagtggaagccctccgccagcgacaagaacgccggcgttggcaagtacggcacctgctgccctgagatggatatctgggaggccaacaagatctccacggcctacactccccatccctgcaagagcctcacccagcagtcctgcgagggcgatgcctgcggtggcacctactcctctacccgctatgctggaacttgcgatcccgatggttgcgatttcaacccttaccgccagggcaacctcaccttctacggccccggctccggcttcaacgttgataccaccaagaagatgactgtcgtgacccagttcatcaagggcagcgacggcaagctttctgagatcaagcgtctctatgttcagaacggcaaggtcattggcaacccccagtccgagattgtcaacaaccccggcagctccgtcaccgacagcttctgcaaggcccagaaggttgctttcaacgaccccgatgacttcaacaagaagggtggctggagcggcatgcacgacgccctcgccaagcccatggttctcgtcatgagcctgtggcacgacgtgagtatctgacccctgagtctcgaataagacactaacatgacattccagcactacgccaacatgctctggctcgactccacctaccccaagggctccaagactcccggctctgctcgcggctcttgccccgaggactctggtgtccccgacactctcgagaaggaggtccccaactccagcgtcagcttctccaacatcaagttcggtcccatcggcagcacctactccggcaccggcggcaacaaccccgaccctgaggagcctgaggagcccgaggagcccgtcggcaccgtcccccagtggggccagtgcggcggcatcaactacagcggtcccaccgcctgcgtgtctccctacaagtgcaacaaggtcaacgactactactcccagtgctactag

SEQ ID NO: 370 - DNA, 1527 bp, Unknown
  Fungal DNA
atgtaccgcattctagccaccgcctcggctctgctggcaaccgcccgtgcccagcaagcctgcaccctcaacgccgaaagcaagcctgccttgacctggtccaagtgcacatccagcggctgcaacaacgtccgcggatccgtcgtggttgacgccaactggcgatggacccatagcacctccagcagcaccaactgctacagcggcaacacctgggacaagactctctgccccgatggaaagacctgcgctgacaagtgctgtcttgatggtgccgactactctggcacctacggagtcacctcgagcggcagccagctcaacctcaagttcgtgactgttggaccgtacagcaccaatgtcggcagccgtctctatctcatggaggatgagaacaactaccagatgttcgacctcctgggcaacgaattcacctttgatgtcgatgtcaacaacatcggatgcggcctgaacggcgccctctacttcgtctccatggacaaggatggtggcaagagccgcttcagcaccaacaaggctggtgccaagtacggaactggatactgcgatgcccagtgccctcgcgatgtcaagttcatcaacggagttgccaactccgacgagtggaagccctccgccagcgacaagaacgccggcgttggcaagtacggcacctgctgccctgagatggatatctgggaggccaacaagatctccacggcctacactccccatccctgcaagagcctcacccagcagtcctgcgagggcgatgcctgcggtggcacctactcctctacccgctatgctggaacttgcgatcccgatggttgcgatttcaacccttaccgccagggcaacctcaccttctacggccccggctccggcttcaacgttgataccaccaagaagatgactgtcgtgacccagttcatcaagggcagcgacggcaagctttctgagatcaagcgtctctatgttcagaacggcaaggtcattggcaacccccagtccgagattgtcaacaaccccggcagctccgtcaccgacagcttctgcaaggcccagaaggttgctttcaacgaccccgatgacttcaacaagaagggtggctggagcggcatgcacgacgccctcgccaagcccatggttctcgtcatgagcctgtggcacgaccactacgccaacatgctctggctcgactccacctaccccaagggctccaagactcccggctctgctcgcggctcttgccccgaggactctggtgtccccgacactctcgagaaggaggtccccaactccagcgtcagcttctccaacatcaagttcggtcccatcggcagcacctactccggcaccggcggcaacaaccccgaccctgaggagcctgaggagcccgaggagcccgtcggcaccgtcccccagtggggccagtgcggcggcatcaactacagcggtcccaccgcctgcgtgtctccctacaagtgcaacaaggtcaacgactactactcccagtgctactag

SEQ ID NO: 371 - protein, 508 aa, Unknown
  Fungal protein
MYRILATASALLATARAQQACTLNAESKPALTWSKCTSSGCNNVRGSVVVDANWRWTHSTSSSTNCYSGNTWDKTLCPDGKTCADKCCLDGADYSGTYGVTSSGSQLNLKFVTVGPYSTNVGSRLYLMEDENNYQMFDLLGNEFTFDVDVNNIGCGLNGALYFVSMDKDGGKSRFSTNKAGAKYGTGYCDAQCPRDVKFINGVANSDEWKPSASDKNAGVGKYGTCCPEMDIWEANKISTAYTPHPCKSLTQQSCEGDACGGTYSSTRYAGTCDPDGCDFNPYRQGNLTFYGPGSGFNVDTTKKMTVVTQFIKGSDGKLSEIKRLYVQNGKVIGNPQSEIVNNPGSSVTDSFCKAQKVAFNDPDDFNKKGGWSGMHDALAKPMVLVMSLWHDHYANMLWLDSTYPKGSKTPGSARGSCPEDSGVPDTLEKEVPNSSVSFSNIKFGPIGSTYSGTGGNNPDPEEPEEPEEPVGTVPQWGQCGGINYSGPTACVSPYKCNKVNDYYSQCY

SEQ ID NO: 372 - DNA, 1651 bp, Botrytis cinerea ATCC 204446
atgggttttaagaatgctctcctcgctgccgcggctgtagcacctactgtttatgcacagggtgcagcttacgcacaatgtaagttatcacgctttactactttgtaacatggtgttaacacgtctttcaggtggtggtcaaggttggagtggcgcaacaacttgtgtttcgggatatacctgtgttgtcaacaatgcatactattctcaatgtttacccggctctgcggtcacgactacagcaacgacagcccccaccgcaacgactcccacaacaatcatcacttctaccaccaaagctaccacgaccacaggtggtagcagtgcaacgacaacagcagcagttgctggtaatccattctcaggaaaagcactttatgcgaatccatactatgcttcggaaatctctgccagtgctatcccttcactcactggagccatggccactaaagctgctgcggtagcaaaggttccaactttctattggctgtaagttattgtcttcgatcagatgttgaatacgatagctaatagactcagtgacaccgcagccaaagttccattgatgggaacttaccttgccaacattcgggccttgaacaaagcaggagcaaatccacctgttgctggtactttcgtagtctatgatttgccagacagagattgtgcagctgcagcttccaacggagaatacagcattgcagacggtggtctcgtaaaatacaaagcttacatcgattccatcgtcgctcttttgaaaacttactctgatgttagcgttattctcgtcattggtaagtggatcattcatctcaagcttgcatagatttgtggctaaccacacaatagaacccgattcgttggccaatctagtcaccaacttgtccgtcgcaaaatgttccaacgcccaagcagcctatctagaaggtaccgaatatgccatcgcgcaattgaatcttccaaacgtcgctatgtacttggatgctggacacgctggttggttaggatggcctgcaaatatcggaccagctgcacagctcttcggccaaatctacaaagcagctggaagcccagctgcagtcagaggtcttgcaactaatgttgcaaactacaatgcttggactagcaccacttgcccgtcctacacctctggcgattccaactgtaacgagaaattgtacatcaacgctcttgctccgcttttgaccgctcaaggtttcccagctcacttcatcatggatactagtaagtaacactgtcgcggtactttttgaatgatactaacagcagaaataggtcgcaatggtgttcaaccaaccgcacaacaagcctggggagactggtgcaatctcatcggcaccggattcggtgttcgaccaaccacaaacacaggagatgcattggaagacgcatttgtctggatcaagcccggtggagaaggcgacgttagtttcccccacctgtccattctttcttctcttttcttcaacatacatactaactccataatcagggcacttcggacaccaccgctgcgcgatacgatttccactgcggactcgcagatgcgctcaagccagctccagaagcgggtacttggttccaagcttactttgcccaattactcaccaatgccaatcccagcttttaa

SEQ ID NO: 373 - DNA, 1374 bp, Botrytis cinerea ATCC 204446
atgggttttaagaatgctctcctcgctgccgcggctgtagcacctactgtttatgcacagggtgcagcttacgcacaatgtggtggtcaaggttggagtggcgcaacaacttgtgtttcgggatatacctgtgttgtcaacaatgcatactattctcaatgtttacccggctctgcggtcacgactacagcaacgacagcccccaccgcaacgactcccacaacaatcatcacttctaccaccaaagctaccacgaccacaggtggtagcagtgcaacgacaacagcagcagttgctggtaatccattctcaggaaaagcactttatgcgaatccatactatgcttcggaaatctctgccagtgctatcccttcactcactggagccatggccactaaagctgctgcggtagcaaaggttccaactttctattggcttgacaccgcagccaaagttccattgatgggaacttaccttgccaacattcgggccttgaacaaagcaggagcaaatccacctgttgctggtactttcgtagtctatgatttgccagacagagattgtgcagctgcagcttccaacggagaatacagcattgcagacggtggtctcgtaaaatacaaagcttacatcgattccatcgtcgctcttttgaaaacttactctgatgttagcgttattctcgtcattgaacccgattcgttggccaatctagtcaccaacttgtccgtcgcaaaatgttccaacgcccaagcagcctatctagaaggtaccgaatatgccatcgcgcaattgaatcttccaaacgtcgctatgtacttggatgctggacacgctggttggttaggatggcctgcaaatatcggaccagctgcacagctcttcggccaaatctacaaagcagctggaagcccagctgcagtcagaggtcttgcaactaatgttgcaaactacaatgcttggactagcaccacttgcccgtcctacacctctggcgattccaactgtaacgagaaattgtacatcaacgctcttgctccgcttttgaccgctcaaggtttcccagctcacttcatcatggatactagtcgcaatggtgttcaaccaaccgcacaacaagcctggggagactggtgcaatctcatcggcaccggattcggtgttcgaccaaccacaaacacaggagatgcattggaagacgcatttgtctggatcaagcccggtggagaaggcgacggcacttcggacaccaccgctgcgcgatacgatttccactgcggactcgcagatgcgctcaagccagctccagaagcgggtacttggttccaagcttactttgcccaattactcaccaatgccaatcccagcttttaa

SEQ ID NO: 374 - protein, 457 aa, Botrytis cinerea ATCC 204446
MGFKNALLAAAAVAPTVYAQGAAYAQCGGQGWSGATTCVSGYTCVVNNAYYSQCLPGSAVTTTATTAPTATTPTTIITSTTKATTTTGGSSATTTAAVAGNPFSGKALYANPYYASEISASAIPSLTGAMATKAAAVAKVPTFYWLDTAAKVPLMGTYLANIRALNKAGANPPVAGTFVVYDLPDRDCAAAASNGEYSIADGGLVKYKAYIDSIVALLKTYSDVSVILVIEPDSLANLVTNLSVAKCSNAQAAYLEGTEYAIAQLNLPNVAMYLDAGHAGWLGWPANIGPAAQLFGQIYKAAGSPAAVRGLATNVANYNAWTSTTCPSYTSGDSNCNEKLYINALAPLLTAQGFPAHFIMDTSRNGVQPTAQQAWGDWCNLIGTGFGVRPTTNTGDALEDAFVWIKPGGEGDGTSDTTAARYDFHCGLADALKPAPEAGTWFQAYFAQLLTNANPSF

SEQ ID NO: 375 - DNA, 1592 bp, Fusarium verticillioides GZ3639
atggcctacaagcttatcctcgccgcctttgcggctacagctcttgctgctcctgttgaagagcgccagtcttgtagcaacggagtttggtatgcctacgaatctcaactacaacaacatctgctcacaataaaacagggctcagtgtggtggccagaactggagcggcactccttgctgcaccagcggaaacaagtgtgtcaagctcaacgacttctactctcagtgccagcccggtactgctgagccttcttcgactgctgctggacccagctccaccactgccaccaagactaccgccactggtggaagctctactactgctggaggctctgtcacttctgcccctcctgcggccagtggcaacccttactctggtgttgatctctgggccaacaactactaccgctctgaggtcatgaacttggctgttcccaagctgagcggtgccaaagctactgctgctgccaaggttgctgatgtgccctccttccagtggatgtaagtcaaactcatatgtggcagagattcgtgtattgacaaggttcagggacacctacgaccacatttctcttatggaggatacccttgctgatatccgcaaggctaacaaggctggtggcaactatgccggtcagttcgttgtctacgatcttcccaaccgtgactgcgctgctgctgcttccaacggagagtactccctcgacaatgacggtgccaacaagtacaaggcctacatcgccaagatcaagggcatcctccaggactactctgacaccaaggtcatccttgtaattggtaagtgaaccatcactcttggtattgcattagctaacccccattgcagagcctgattcccttgctaacctggtcaccaacctgaacgtcgacaagtgcgccaaggccgagagtgcttacaaggagctcactgtctacgccatcaaggaactcaacctccccaacgtctccatgtaccttgatgccggtcacggtggctggctcggctggcctgccaacatcggccctgctgctaagctctacgcccagatctacaaggacgctggcaagccttctcgcgttcgcggtctcgtcaccaacgtctccaactacaacggctggaagctctccacgaagcccgactacaccgagagcaatcccaactacgatgagcagcgatacatcaacgccttcgctcctcttctcgcccaggagggttggtccaacgtcaagttcatcgtcgaccagggccgatctggcaagcagcctactggccagaaggctcagggcgactggtgcaacgccaagggtactggtttcggacttcgaccttccaccaacactggtgatgctctcgccgatgctttcgtctgggtcaagcctggtggtgagtctgatggtacctctgatacatctgctgctcgctacgactaccactgtggtctcgatgatgctctcaagtaagttgctccatccgatattctcactatatcccgtgctaatatttcatcttcaggcccgctcctgaggctggaacctggtttcaggcttacttcgagcagctcctcgacaacgccaacccctcgttcatgtaa

SEQ ID NO: 376 - DNA, 1389 bp, Fusarium verticillioides GZ3639
atggcctacaagcttatcctcgccgcctttgcggctacagctcttgctgctcctgttgaagagcgccagtcttgtagcaacggagtttgggctcagtgtggtggccagaactggagcggcactccttgctgcaccagcggaaacaagtgtgtcaagctcaacgacttctactctcagtgccagcccggtactgctgagccttcttcgactgctgctggacccagctccaccactgccaccaagactaccgccactggtggaagctctactactgctggaggctctgtcacttctgcccctcctgcggccagtggcaacccttactctggtgttgatctctgggccaacaactactaccgctctgaggtcatgaacttggctgttcccaagctgagcggtgccaaagctactgctgctgccaaggttgctgatgtgccctccttccagtggatggacacctacgaccacatttctcttatggaggatacccttgctgatatccgcaaggctaacaaggctggtggcaactatgccggtcagttcgttgtctacgatcttcccaaccgtgactgcgctgctgctgcttccaacggagagtactccctcgacaatgacggtgccaacaagtacaaggcctacatcgccaagatcaagggcatcctccaggactactctgacaccaaggtcatccttgtaattgagcctgattcccttgctaacctggtcaccaacctgaacgtcgacaagtgcgccaaggccgagagtgcttacaaggagctcactgtctacgccatcaaggaactcaacctccccaacgtctccatgtaccttgatgccggtcacggtggctggctcggctggcctgccaacatcggccctgctgctaagctctacgcccagatctacaaggacgctggcaagccttctcgcgttcgcggtctcgtcaccaacgtctccaactacaacggctggaagctctccacgaagcccgactacaccgagagcaatcccaactacgatgagcagcgatacatcaacgccttcgctcctcttctcgcccaggagggttggtccaacgtcaagttcatcgtcgaccagggccgatctggcaagcagcctactggccagaaggctcagggcgactggtgcaacgccaagggtactggtttcggacttcgaccttccaccaacactggtgatgctctcgccgatgctttcgtctgggtcaagcctggtggtgagtctgatggtacctctgatacatctgctgctcgctacgactaccactgtggtctcgatgatgctctcaagcccgctcctgaggctggaacctggtttcaggcttacttcgagcagctcctcgacaacgccaacccctcgttcatgtaa

SEQ ID NO: 377 - protein, 462 aa, Fusarium verticillioides GZ3639
MAYKLILAAFAATALAAPVEERQSCSNGVWAQCGGQNWSGTPCCTSGNKCVKLNDFYSQCQPGTAEPSSTAAGPSSTTATKTTATGGSSTTAGGSVTSAPPAASGNPYSGVDLWANNYYRSEVMNLAVPKLSGAKATAAAKVADVPSFQWMDTYDHISLMEDTLADIRKANKAGGNYAGQFVVYDLPNRDCAAAASNGEYSLDNDGANKYKAYIAKIKGILQDYSDTKVILVIEPDSLANLVTNLNVDKCAKAESAYKELTVYAIKELNLPNVSMYLDAGHGGWLGWPANIGPAAKLYAQIYKDAGKPSRVRGLVTNVSNYNGWKLSTKPDYTESNPNYDEQRYINAFAPLLAQEGWSNVKFIVDQGRSGKQPTGQKAQGDWCNAKGTGFGLRPSTNTGDALADAFVWVKPGGESDGTSDTSAARYDYHCGLDDALKPAPEAGTWFQAYFEQLLDNANPSFM

SEQ ID NO: 378 - DNA, 1697 bp, Unknown
  Fungal DNA
atgatgcgatatctttccatcgttgccgccacggcaattctgaccggagttgaagctcagcaatcagtctggggacaatgtaagaagtctcttgagaagcttcaagttaagagtgatggttattgacaattttggaaacatataggtggcggccaaggctggtctggcgcgacttcatgcgccgccggttctacatgcagcactctcaacccttgtaaggtgccagatgattcgtatgttggctctgattactgaacatcacttgttcattagactacgcacaatgtatccctggtaccgctacttcaactacattggtgacaacaacgtcttctaccagcgtcggaacgacatcgccgccgacaacaaccacgacgaaagctagtaccactgctactaccactgccgctgcatccggaaacccattctctggttaccagctttatgccaatccgtactattcttcagaagtacacactcttgccatcccatctttgactggctcgctcgctgctgctgctaccaaagctgccgagatcccctcatttgtctggctgtgagttttcccgagaaaatccactgagtgatataaatacacgcatggacatttcctaaacctctatagtgacacggcagctaaagtgcctacaatgggcacctacttggccaacattgaggctgcaaacaaggctggcgccagcccacctattgccggtatcttcgttgtctatgacttgcctgaccgtgactgtgcagctgctgcaagtaatggcgaatacactgtagcaaacaacggtgttgcaaactacaaggcttacatcgacagcattgtggcacagttgaaagcttatcccgatgtgcacacaatccttgtcattggtacgttctctactattgggtcttcaagatgtactcttgagagaaattcgtgtctaacaaaccgccgatctacagagcctgatagtctcgccaacatggtcaccaatctgtctacagccaaatgtgctgcggctcaatctgcatactatgagtgcgtcaactacgcattgatccatctcaacttggccaacgtggccatgtacattgatgctggtcatgctggttggctgggatggcctgccaacctttcaccagcggctgaactcttcgcaacagtctataagaatgcaagtgcccctgcatctcttcgtggattggccaccaacgttgccaactacaacgcttggtcgatcagcagcccaccctcatacacatctggcgactccaactacgacgaaaagctctacattaacgctttgtctcctctcctgacatctaacggctggcctaacgctcacttcatcatggatacttgtaagtgtgctgcggatgaatcaagtgctcgctttactaactgaacttctttagcccgaaacggtgttcaaccgactaagcagcaggcatggggtgactggtgcaatgtgatcggaaccggcttcggtgttcaaccgacaacgaataccggtgacccacttgaggatgcctttgtctgggtcaagccaggtggtgaaagtgatggtacatcaaacagttccgctactcgttacgatttccattgcggctacagtgatgcacttcaaccagcccccgaggctggtacttggttccaagcatactttgtccagctattgaccaatgccaacccagctttggtctag

SEQ ID NO: 379 - DNA, 1374 bp, Unknown
  Fungal DNA
atgatgcgatatctttccatcgttgccgccacggcaattctgaccggagttgaagctcagcaatcagtctggggacaatgtggcggccaaggctggtctggcgcgacttcatgcgccgccggttctacatgcagcactctcaacccttactacgcacaatgtatccctggtaccgctacttcaactacattggtgacaacaacgtcttctaccagcgtcggaacgacatcgccgccgacaacaaccacgacgaaagctagtaccactgctactaccactgccgctgcatccggaaacccattctctggttaccagctttatgccaatccgtactattcttcagaagtacacactcttgccatcccatctttgactggctcgctcgctgctgctgctaccaaagctgccgagatcccctcatttgtctggcttgacacggcagctaaagtgcctacaatgggcacctacttggccaacattgaggctgcaaacaaggctggcgccagcccacctattgccggtatcttcgttgtctatgacttgcctgaccgtgactgtgcagctgctgcaagtaatggcgaatacactgtagcaaacaacggtgttgcaaactacaaggcttacatcgacagcattgtggcacagttgaaagcttatcccgatgtgcacacaatccttgtcattgagcctgatagtctcgccaacatggtcaccaatctgtctacagccaaatgtgctgcggctcaatctgcatactatgagtgcgtcaactacgcattgatccatctcaacttggccaacgtggccatgtacattgatgctggtcatgctggttggctgggatggcctgccaacctttcaccagcggctgaactcttcgcaacagtctataagaatgcaagtgcccctgcatctcttcgtggattggccaccaacgttgccaactacaacgcttggtcgatcagcagcccaccctcatacacatctggcgactccaactacgacgaaaagctctacattaacgctttgtctcctctcctgacatctaacggctggcctaacgctcacttcatcatggatacttcccgaaacggtgttcaaccgactaagcagcaggcatggggtgactggtgcaatgtgatcggaaccggcttcggtgttcaaccgacaacgaataccggtgacccacttgaggatgcctttgtctgggtcaagccaggtggtgaaagtgatggtacatcaaacagttccgctactcgttacgatttccattgcggctacagtgatgcacttcaaccagcccccgaggctggtacttggttccaagcatactttgtccagctattgaccaatgccaacccagctttggtctag

SEQ ID NO: 380 - protein, 457 aa, Unknown
  Fungal protein
MMRYLSIVAATAILTGVEAQQSVWGQCGGQGWSGATSCAAGSTCSTLNPYYAQCIPGTATSTTLVTTTSSTSVGTTSPPTTTTTKASTTATTTAAASGNPFSGYQLYANPYYSSEVHTLAIPSLTGSLAAAATKAAEIPSFVWLDTAAKVPTMGTYLANIEAANKAGASPPIAGIFVVYDLPDRDCAAAASNGEYTVANNGVANYKAYIDSIVAQLKAYPDVHTILVIEPDSLANMVTNLSTAKCAAAQSAYYECVNYALIHLNLANVAMYIDAGHAGWLGWPANLSPAAELFATVYKNASAPASLRGLATNVANYNAWSISSPPSYTSGDSNYDEKLYINALSPLLTSNGWPNAHFIMDTSRNGVQPTKQQAWGDWCNVIGTGFGVQPTTNTGDPLEDAFVWVKPGGESDGTSNSSATRYDFHCGYSDALQPAPEAGTWFQAYFVQLLTNANPALV

SEQ ID NO: 381 - DNA, 1507 bp, Unknown
  Fungal DNA
atgaatatgcactccatcaacatgcgagccatctggcccctcgtctctctcttctctgtcgtcaaggccctccccgccgcaagcgcgactgcttcagcatctgttgctgcttcgagctctccggcaccaacggcctctgctaccggcaatccctttgagggataccagctctatgtgaatccttactataagtcgcaagtggagagttcggctattccatcattgtctgccagctcgctggtcgcgcaggcaagtgctgcggccgatgtgccttcgttttactggctgtgagtatcccttcaatgatattcctgggtttaggctgatgatgcgatactcaatgttcagagacacggccgacaaggtgcctaccatgggtgaatatctagacgatatccagacgcaaaacgccgctggagcgagtcctcccattgctggtatcttcgtcgtctatgacctgccggatcgggattgcgctgccttggctagtaatggcgaatacgcgatcagtgatggaggcgtggagaagtataaggcgtacattgattctatccgcgagcaggtcgagacatactcggatgttcagactattttgatcatcggtgagtgcctcctgcctggggttgctcgggagtgaattataataagatactgatttattctcgcagaaccggatagcttggctaacctggtgacgaatctcgatgtggctaaatgcgccaatgcccaatctgcgtatctggaatgcacaaattatgcccttgagcagctgaatctgccgaatgtggctatgtatcttgatgctggtacgtcttactatgtcgaggatactgggcgcagttaacaatgtccacaggccatgctggatggctgggatggcctgccaacatcggtcccgcggcggaactctacgcatcggtgtataagaacgcatcatctccagcggctgttcgtggactcgctaccaatgtagccaacttcaacgcctggagcatcgacacttgtccctcttatacatcgggcaacgatgtctgtgatgagaagagctacatcaacgcctttgcaccggagctctctagtgctggatttgatgcccacttcattaccgatacgggtgagtgttactcttatgcacagcgacatgttcagtctgactcactgaattaggtcgcaatggaaagcagcccactggacagagcgcgtggggtgactggtgcaatgtcaaggataccggcttcggtgctcagccaaccaccgatactggagacgagctggctgatgcctttgtctgggtcaagcctggcggagagagtgatgggacgtcggacactagctcttctcgctacgatgcgcattgcggatatagtgatgctttgcagcctgccccggaggccggtacttggttccaggtgggtgttgattgaagtgtggttggaggtatcatgctaacattatgttctaggcatactttgagcagcttttgaccaacgccaacccttccctttga

SEQ ID NO: 382 - DNA, 1224 bp, Unknown
  Fungal DNA
atgaatatgcactccatcaacatgcgagccatctggcccctcgtctctctcttctctgtcgtcaaggccctccccgccgcaagcgcgactgcttcagcatctgttgctgcttcgagctctccggcaccaacggcctctgctaccggcaatccctttgagggataccagctctatgtgaatccttactataagtcgcaagtggagagttcggctattccatcattgtctgccagctcgctggtcgcgcaggcaagtgctgcggccgatgtgccttcgttttactggctagacacggccgacaaggtgcctaccatgggtgaatatctagacgatatccagacgcaaaacgccgctggagcgagtcctcccattgctggtatcttcgtcgtctatgacctgccggatcgggattgcgctgccttggctagtaatggcgaatacgcgatcagtgatggaggcgtggagaagtataaggcgtacattgattctatccgcgagcaggtcgagacatactcggatgttcagactattttgatcatcgaaccggatagcttggctaacctggtgacgaatctcgatgtggctaaatgcgccaatgcccaatctgcgtatctggaatgcacaaattatgcccttgagcagctgaatctgccgaatgtggctatgtatcttgatgctggccatgctggatggctgggatggcctgccaacatcggtcccgcggcggaactctacgcatcggtgtataagaacgcatcatctccagcggctgttcgtggactcgctaccaatgtagccaacttcaacgcctggagcatcgacacttgtccctcttatacatcgggcaacgatgtctgtgatgagaagagctacatcaacgcctttgcaccggagctctctagtgctggatttgatgcccacttcattaccgatacgggtcgcaatggaaagcagcccactggacagagcgcgtggggtgactggtgcaatgtcaaggataccggcttcggtgctcagccaaccaccgatactggagacgagctggctgatgcctttgtctgggtcaagcctggcggagagagtgatgggacgtcggacactagctcttctcgctacgatgcgcattgcggatatagtgatgctttgcagcctgccccggaggccggtacttggttccaggcatactttgagcagcttttgaccaacgccaacccttccctttga

SEQ ID NO: 383 - protein, 407 aa, Unknown
  Fungal protein
MNMHSINMRAIWPLVSLFSVVKALPAASATASASVAASSSPAPTASATGNPFEGYQLYVNPYYKSQVESSAIPSLSASSLVAQASAAADVPSFYWLDTADKVPTMGEYLDDIQTQNAAGASPPIAGIFVVYDLPDRDCAALASNGEYAISDGGVEKYKAYIDSIREQVETYSDVQTILIIEPDSLANLVTNLDVAKCANAQSAYLECTNYALEQLNLPNVAMYLDAGHAGWLGWPANIGPAAELYASVYKNASSPAAVRGLATNVANFNAWSIDTCPSYTSGNDVCDEKSYINAFAPELSSAGFDAHFITDTGRNGKQPTGQSAWGDWCNVKDTGFGAQPTTDTGDELADAFVWVKPGGESDGTSDTSSSRYDAHCGYSDALQPAPEAGTWFQAYFEQLLTNANPSL

SEQ ID NO: 384 - DNA, 1354 bp, Unknown
  Fungal DNA
atgaaaggtttcttcactgcccttctggcatccgccatcgccggcgctttcgccgccccctctcccgttgagcagggtcccattactgcccgtcaggctggtggtgcttgcgccactcccgttactctttccggcaaccccttcgcttcccgctctatctacgccaacaaagagtactccaaggaggtcgtctctgctgctgctgccatgaccgctggctctttgaagaccgctgccgctaaggttgcgaacgtcggaaccttcctgtggatgtaagaacatgcccttacaaatgtgttggatcagagctaatcttgttactagcgacacccgtgcccgtattgcagtcgttgaggacaaccttaaggatgttccttgcaaccagattgcagctctggtcatctacgatcttcccggtcgtgactgtgctgccaaggcttccaacggagagttgcctgtaggagatctagctgtctacaagtccgagtacattgaccgtaagcgcttgtttgccaatgtgtatattgcagaatgacaatctctaatatcgtaccagccattgttgctatcttcaagaagtaccccaaaactgccattgctctcgttatcgagcccgattcgcttcccaacttggtcaccaacagcgacctgtctacctgccagaactctgctagcggctaccgtgagggtgttgcttatgctcttaagcagctcaacttgcccaacattgctatgtacatcgatgctggtcacggtggctggctcggctggaacgacaacctcagtatgtttccctcgcgaaattaatcgacattcgcttgctaacgatcaaacagagcccggtgccaaggagcttgccaccgtctacaagaacgctggttcccccaagtccgtccgtggttttgccaccaacgttgctggctggaatgcctgggacctcactcccggagagttctccaaggccactgatgctcagtggaacaagtgccagaacgagaagctctacgtcgaggccttctctcccgagctcaagagcgccggtatgcccggccaggccatcgtcgacactggccgtaacgccgtcactggtctccgcaaggagtggggccactggtgcaacgtcaacggtgctggttttggtgtccgccccaccaccaacactggctccagcctcgtcgactcctttgtctgggtcaagcccggtggtgagtctgatggtacctctgacacctctgccactcgttacgactctttctgcggtatggaggatgccttcaagcccgctcctgaggctggtacctggaaccaggcctacttcgagatgctcgtcaagaacgctaagcccgctttctaa

SEQ ID NO: 385 - DNA, 1191 bp, Unknown
  Fungal DNA
atgaaaggtttcttcactgcccttctggcatccgccatcgccggcgctttcgccgccccctctcccgttgagcagggtcccattactgcccgtcaggctggtggtgcttgcgccactcccgttactctttccggcaaccccttcgcttcccgctctatctacgccaacaaagagtactccaaggaggtcgtctctgctgctgctgccatgaccgctggctctttgaagaccgctgccgctaaggttgcgaacgtcggaaccttcctgtggatcgacacccgtgcccgtattgcagtcgttgaggacaaccttaaggatgttccttgcaaccagattgcagctctggtcatctacgatcttcccggtcgtgactgtgctgccaaggcttccaacggagagttgcctgtaggagatctagctgtctacaagtccgagtacattgaccccattgttgctatcttcaagaagtaccccaaaactgccattgctctcgttatcgagcccgattcgcttcccaacttggtcaccaacagcgacctgtctacctgccagaactctgctagcggctaccgtgagggtgttgcttatgctcttaagcagctcaacttgcccaacattgctatgtacatcgatgctggtcacggtggctggctcggctggaacgacaacctcaagcccggtgccaaggagcttgccaccgtctacaagaacgctggttcccccaagtccgtccgtggttttgccaccaacgttgctggctggaatgcctgggacctcactcccggagagttctccaaggccactgatgctcagtggaacaagtgccagaacgagaagctctacgtcgaggccttctctcccgagctcaagagcgccggtatgcccggccaggccatcgtcgacactggccgtaacgccgtcactggtctccgcaaggagtggggccactggtgcaacgtcaacggtgctggttttggtgtccgccccaccaccaacactggctccagcctcgtcgactcctttgtctgggtcaagcccggtggtgagtctgatggtacctctgacacctctgccactcgttacgactctttctgcggtatggaggatgccttcaagcccgctcctgaggctggtacctggaaccaggcctacttcgagatgctcgtcaagaacgctaagcccgctttctaa

SEQ ID NO: 386 - protein, 396 aa, Unknown
  Fungal protein
MKGFFTALLASAIAGAFAAPSPVEQGPITARQAGGACATPVTLSGNPFASRSIYANKEYSKEVVSAAAAMTAGSLKTAAAKVANVGTFLWIDTRARIAVVEDNLKDVPCNQIAALVIYDLPGRDCAAKASNGELPVGDLAVYKSEYIDPIVAIFKKYPKTAIALVIEPDSLPNLVTNSDLSTCQNSASGYREGVAYALKQLNLPNIAMYIDAGHGGWLGWNDNLKPGAKELATVYKNAGSPKSVRGFATNVAGWNAWDLTPGEFSKATDAQWNKCQNEKLYVEAFSPELKSAGMPGQAIVDTGRNAVTGLRKEWGHWCNVNGAGFGVRPTTNTGSSLVDSFVWVKPGGESDGTSDTSATRYDSFCGMEDAFKPAPEAGTWNQAYFEMLVKNAKPAF

SEQ ID NO: 387 - DNA, 1354 bp, Unknown
  Fungal DNA
atgaaaggtttcttcactgcccttctggcatccgccatcgccggcgctttcgccgccccctctcccgttgagcagggtcccattactgcccgtcaggctggtggtgcttgcgccactcccgttactctttccagcaaccccttcgcttcccgctctatctacgccaacaaagagtactccaaggaggtcgtctctgctgctgctgccatgaccgctggctctttgaagaccgctgccgctaaggttgcgaacgtcggaaccttcctgtggatgtaagaacatgcccttacaaatgtgttggatcagagctaatcttgttactagcgacacccgtgcccgtattgcggtcgttgaggacaaccttaaggatgttccttgcaaccagattgcagctctggtcatctacgatcttcccggtcgtgactgtgctgccaaggcttccaacggagagttgcctgtaggagatctagctgtctacaagtccgagtacattgaccgtaagcgcttgtttgccaatgtgtatattgcagaatgacaatctctaatatcgtaccagccattgttgctatcttcaagaagtaccccaaaactgccattgctctcgttatcgagcccgattcgcttcccaacttggtcaccaacagcgacctgtctacctgccagaactctgctagcggctaccgtgagggtgttgcttatgctcttaagcagctcaacttgcccaacattgctatgtacatcgatgctggtcacggtggctggctcggctggaacgacaacctcagtatgtttccctcgcgaaattaatcgacattcgcttgctaacgatcaaacagagcccggtgccaaggagcttgccaccgtctacaagaacgctggttcccccaagtccgtccgtggttttgccaccaacgttgctggctggaatgcctgggacctcactcccggagagttctccaaggccactgatgttcagtggaacaagtgccagaacgagaagctctacgtcgaggccttctctcccgagctcaagagcgccggtatgcccggccaggccatcgtcgacactggccgtaacgccgtcactggtctccgcaaggagtggggccactggtgcaacgtcaacggtgctggttttggtgtccgccccaccaccaacactggctccagcctcgtcgactcctttgtctgggtcaagcccggtggtgagtctgatggtacctctgacacctctgccactcgttacgactctttctgcggtatggaggatgccttcaagcccgctcctgaggctggtacctggaaccaggcctacttcgagatgctcgtcaagaacgctaagcccgctttctaa

SEQ ID NO: 388 - DNA, 1191 bp, Unknown
  Fungal DNA
atgaaaggtttcttcactgcccttctggcatccgccatcgccggcgctttcgccgccccctctcccgttgagcagggtcccattactgcccgtcaggctggtggtgcttgcgccactcccgttactctttccagcaaccccttcgcttcccgctctatctacgccaacaaagagtactccaaggaggtcgtctctgctgctgctgccatgaccgctggctctttgaagaccgctgccgctaaggttgcgaacgtcggaaccttcctgtggatcgacacccgtgcccgtattgcggtcgttgaggacaaccttaaggatgttccttgcaaccagattgcagctctggtcatctacgatcttcccggtcgtgactgtgctgccaaggcttccaacggagagttgcctgtaggagatctagctgtctacaagtccgagtacattgaccccattgttgctatcttcaagaagtaccccaaaactgccattgctctcgttatcgagcccgattcgcttcccaacttggtcaccaacagcgacctgtctacctgccagaactctgctagcggctaccgtgagggtgttgcttatgctcttaagcagctcaacttgcccaacattgctatgtacatcgatgctggtcacggtggctggctcggctggaacgacaacctcaagcccggtgccaaggagcttgccaccgtctacaagaacgctggttcccccaagtccgtccgtggttttgccaccaacgttgctggctggaatgcctgggacctcactcccggagagttctccaaggccactgatgttcagtggaacaagtgccagaacgagaagctctacgtcgaggccttctctcccgagctcaagagcgccggtatgcccggccaggccatcgtcgacactggccgtaacgccgtcactggtctccgcaaggagtggggccactggtgcaacgtcaacggtgctggttttggtgtccgccccaccaccaacactggctccagcctcgtcgactcctttgtctgggtcaagcccggtggtgagtctgatggtacctctgacacctctgccactcgttacgactctttctgcggtatggaggatgccttcaagcccgctcctgaggctggtacctggaaccaggcctacttcgagatgctcgtcaagaacgctaagcccgctttctaa

SEQ ID NO: 389 - protein, 396 aa, Unknown
  Fungal protein
MKGFFTALLASAIAGAFAAPSPVEQGPITARQAGGACATPVTLSSNPFASRSIYANKEYSKEVVSAAAAMTAGSLKTAAAKVANVGTFLWIDTRARIAVVEDNLKDVPCNQIAALVIYDLPGRDCAAKASNGELPVGDLAVYKSEYIDPIVAIFKKYPKTAIALVIEPDSLPNLVTNSDLSTCQNSASGYREGVAYALKQLNLPNIAMYIDAGHGGWLGWNDNLKPGAKELATVYKNAGSPKSVRGFATNVAGWNAWDLTPGEFSKATDVQWNKCQNEKLYVEAFSPELKSAGMPGQAIVDTGRNAVTGLRKEWGHWCNVNGAGFGVRPTTNTGSSLVDSFVWVKPGGESDGTSDTSATRYDSFCGMEDAFKPAPEAGTWNQAYFEMLVKNAKPAF

SEQ ID NO: 390 - DNA, 1220 bp, Unknown
  Fungal DNA
atggtccaactcacgtctttcgtccttgcctctgcggcattgatcggtgctgctgctgctgccgcccatccccagctcgctgccaaaagcgagagtggtccaaatccatgggttggtaaggaccgctatgtccccgtgagctatggcaagaagctcgacgaaacaattgctgctttcctggccaagaacgacactctcaatgccgcccgtacacgtaccgttcagaagaaggtttccaccttcgcctgggtcactactcgtgctcttttgcccaccatagacaccgcggtggccgaggcacgcgagcaaaagaagaagtcacgcaagcgaatcgtggtcggtctcgtcctctacaaccttcccgaccgtgactgctccgctggcgagtctgctggcgagctcagcagcgacaaagatggcctgaacatctacaagactgagttcatcgatgagtatgccaagaaggtctccaaggccaaagatctcgacttcgctattgtccttgagcctgattctttgggcaatgccatcaccaaccagcacattccgttctgcgccaacgctacgcccatctacgagcagggtcttgcatacgccattgccaagctacaataccccaatgtccacctctacctcgacgccgcccacggcggctggctcggatgggccgacaacctcgaacctagtaagtcccaaaagcaccatctcccccgcaaacaacaaacactaacacgtccacagccgccaaaatcttcgccaaagtcgtcgaaatggccaggaagatcaacccgctcgccaaactccgcggcttctcgacaaacgtctcaaactacaacccgttcaacgccaaaatccgcgaaaactacaccgagtggtccccctcatgggacgagtcgcactacgcttcttccctggctccgttcctcgaggagaacggtcttccatccaagttcatcatcgaccagggccgcgttgctaacgttggtgcgcgtgaggagtggggtgagtggtgcaatgtttctcctgctggtttcggtatcaggcctactaccaagggttacaacaacacgcatgttgacagcattgtctggatcaagcctggtggtgagagcgatggtcgctgcggactggagggcgccccggcggctggcgcctggtttgatgagtatgtgcagatgttggttaaggaggcggacccgccgcttgagcctacctactag

SEQ ID NO: 391 - DNA, 1164 bp, Unknown
  Fungal DNA
atggtccaactcacgtctttcgtccttgcctctgcggcattgatcggtgctgctgctgctgccgcccatccccagctcgctgccaaaagcgagagtggtccaaatccatgggttggtaaggaccgctatgtccccgtgagctatggcaagaagctcgacgaaacaattgctgctttcctggccaagaacgacactctcaatgccgcccgtacacgtaccgttcagaagaaggtttccaccttcgcctgggtcactactcgtgctcttttgcccaccatagacaccgcggtggccgaggcacgcgagcaaaagaagaagtcacgcaagcgaatcgtggtcggtctcgtcctctacaaccttcccgaccgtgactgctccgctggcgagtctgctggcgagctcagcagcgacaaagatggcctgaacatctacaagactgagttcatcgatgagtatgccaagaaggtctccaaggccaaagatctcgacttcgctattgtccttgagcctgattctttgggcaatgccatcaccaaccagcacattccgttctgcgccaacgctacgcccatctacgagcagggtcttgcatacgccattgccaagctacaataccccaatgtccacctctacctcgacgccgcccacggcggctggctcggatgggccgacaacctcgaacctaccgccaaaatcttcgccaaagtcgtcgaaatggccaggaagatcaacccgctcgccaaactccgcggcttctcgacaaacgtctcaaactacaacccgttcaacgccaaaatccgcgaaaactacaccgagtggtccccctcatgggacgagtcgcactacgcttcttccctggctccgttcctcgaggagaacggtcttccatccaagttcatcatcgaccagggccgcgttgctaacgttggtgcgcgtgaggagtggggtgagtggtgcaatgtttctcctgctggtttcggtatcaggcctactaccaagggttacaacaacacgcatgttgacagcattgtctggatcaagcctggtggtgagagcgatggtcgctgcggactggagggcgccccggcggctggcgcctggtttgatgagtatgtgcagatgttggttaaggaggcggacccgccgcttgagcctacctactag

SEQ ID NO: 392 - protein, 387 aa, Unknown
  Fungal protein
MVQLTSFVLASAALIGAAAAAAHPQLAAKSESGPNPWVGKDRYVPVSYGKKLDETIAAFLAKNDTLNAARTRTVQKKVSTFAWVTTRALLPTIDTAVAEAREQKKKSRKRIVVGLVLYNLPDRDCSAGESAGELSSDKDGLNIYKTEFIDEYAKKVSKAKDLDFAIVLEPDSLGNAITNQHIPFCANATPIYEQGLAYAIAKLQYPNVHLYLDAAHGGWLGWADNLEPTAKIFAKVVEMARKINPLAKLRGFSTNVSNYNPFNAKIRENYTEWSPSWDESHYASSLAPFLEENGLPSKFIIDQGRVANVGAREEWGEWCNVSPAGFGIRPTTKGYNNTHVDSIVWIKPGGESDGRCGLEGAPAAGAWFDEYVQMLVKEADPPLEPTY

SEQ ID NO: 393 - DNA, 1226 bp, Unknown
  Fungal DNA
atgaagctcgtggttgccgccgccgctctcagtggtggcgctctcgccaagaagtgtaggcccattgcctcgtacgaggacagcccctttgacggcgtccagctgcgccctgacccctactacgtcgacgagattgagaacctcgctattccccagctgcccgccgacctagtacctgctgccaaggagttggccaaggttccgaccttccagtggctgtgagttcttgccgtggacagcatcttcccagaccagtcgactgacctccagccagcgacaagcttgacaagctcgatcttctcaacagcaccctgcacgagattcgcgccgagaacgatgcgggggccagccctccctacgcccacaccattgtcgtgtacaacttccccgacagagactgctcggccaaggcgtccgccggcgagctgcacctggatgaggacggcctgaaccggtacaagtacgagtacatcgaccccattgtcgatttggtcaaggagttccgcgacatccgcatcatcattgcctacgaacctgacggccttgccaatcttatcaccaaccttggcgtcgagaagtgcgccaacgcggcatcggcctaccgcgagtcgactgagtacgccctcgaggcctttgacctggccaacgtcgggctctacatcgacgccggtcacgccgggtggctgggctgggacggcaacctgccgctgacggccgagctctacggcgagctgtaccgcaacgctggctcgcccaagtccactcgtggcatcgtgaccaacgtcagcaactacaacggctggaacctcactgagccaccggcatacacggagcccaacgcgcagtgggacgagtccaagttccacgcagccatcgcgcccttcctcgaggagaacggcttccccgcccacgccattgctgaccagggccgaagtggcagccaacccggcggccgtttggaatgggggcattggtgcaacgtaaaaaacagcgcttttgggaagcgtccgacaacggagactggccagagcgacattacggatgccattgtctgggtcaagcctggcggcgagggcgacggcacgagtgacgagacggccgctcgtttcgacgaaacatgtgtgtcgccgtcttcgttcatccctgcgcctgaagctggtgcctggttccaggagtactttgagatgctgctgcgcaatgccaacccgccgttcgcttcttcgtaa

SEQ ID NO: 394 - DNA, 1170 bp, Unknown
  Fungal DNA
atgaagctcgtggttgccgccgccgctctcagtggtggcgctctcgccaagaagtgtaggcccattgcctcgtacgaggacagcccctttgacggcgtccagctgcgccctgacccctactacgtcgacgagattgagaacctcgctattccccagctgcccgccgacctagtacctgctgccaaggagttggccaaggttccgaccttccagtggctcgacaagcttgacaagctcgatcttctcaacagcaccctgcacgagattcgcgccgagaacgatgcgggggccagccctccctacgcccacaccattgtcgtgtacaacttccccgacagagactgctcggccaaggcgtccgccggcgagctgcacctggatgaggacggcctgaaccggtacaagtacgagtacatcgaccccattgtcgatttggtcaaggagttccgcgacatccgcatcatcattgcctacgaacctgacggccttgccaatcttatcaccaaccttggcgtcgagaagtgcgccaacgcggcatcggcctaccgcgagtcgactgagtacgccctcgaggcctttgacctggccaacgtcgggctctacatcgacgccggtcacgccgggtggctgggctgggacggcaacctgccgctgacggccgagctctacggcgagctgtaccgcaacgctggctcgcccaagtccactcgtggcatcgtgaccaacgtcagcaactacaacggctggaacctcactgagccaccggcatacacggagcccaacgcgcagtgggacgagtccaagttccacgcagccatcgcgcccttcctcgaggagaacggcttccccgcccacgccattgctgaccagggccgaagtggcagccaacccggcggccgtttggaatgggggcattggtgcaacgtaaaaaacagcgcttttgggaagcgtccgacaacggagactggccagagcgacattacggatgccattgtctgggtcaagcctggcggcgagggcgacggcacgagtgacgagacggccgctcgtttcgacgaaacatgtgtgtcgccgtcttcgttcatccctgcgcctgaagctggtgcctggttccaggagtactttgagatgctgctgcgcaatgccaacccgccgttcgcttcttcgtaa

SEQ ID NO: 395 - protein, 389 aa, Unknown
  Fungal protein
MKLVVAAAALSGGALAKKCRPIASYEDSPFDGVQLRPDPYYVDEIENLAIPQLPADLVPAAKELAKVPTFQWLDKLDKLDLLNSTLHEIRAENDAGASPPYAHTIVVYNFPDRDCSAKASAGELHLDEDGLNRYKYEYIDPIVDLVKEFRDIRIIIAYEPDGLANLITNLGVEKCANAASAYRESTEYALEAFDLANVGLYIDAGHAGWLGWDGNLPLTAELYGELYRNAGSPKSTRGIVTNVSNYNGWNLTEPPAYTEPNAQWDESKFHAAIAPFLEENGFPAHAIADQGRSGSQPGGRLEWGHWCNVKNSAFGKRPTTETGQSDITDAIVWVKPGGEGDGTSDETAARFDETCVSPSSFIPAPEAGAWFQEYFEMLLRNANPPFASS

SEQ ID NO: 396 - DNA, 2300 bp, Unknown
  Fungal DNA
atggcttccaagatcttcctcggtgcgcttctcagcgccgccgccctcgccgctcctctcgaggagaggcagaactgcgccactgtctggtgcgtgcattggcttttccagtcttcttgaacatttctgacttccatcaggggacaatgtggtggtaacggctggactggccctacctgctgcgctgccggctccgtctgctccgtcggaaacccctggtactctcagtgcctgcccggcaccgctcctccccctgcctcgtcgaccaccacctccaggcccccgagctccagcgccgcccctccttcttccaccgtcgtccctggaagcagcaccaggcccaccagcgtcgttgttcccaccaccaacgctggtgtcacttccaccagcagcggccctgcccccaccggcggcgccacctactctggcaaccccttcgtcggcgtcaaccagtgggccaacgcctactaccgctccgaggttctcagcctcgccgtcccctccctgactggccccctggccaccgccgccgccaaggtcgccgacgttcccaccttccagtggatgtgagtagcatttggagtttattttggtcctccgctgacctttccagggacacccgcgccaaggttccccttgttgatactgctcttggcgagatccgcgccgccaacgcccgcggcggcaacaacgccggtattttcgtcgtctacaacctgcccgaccgcgactgtgccgccgccgccagcaacggcgagcttgccattgccgatgatggtgtcaacaagtacaaggcctacatcgactccatccgtgctgtgcttctcaagtactccgacgtccgcaccatcctcgtcattgagcccgactcgctcgccaacatggttcgtactctgggaatgcattttaatgaatgaataaactaacgcccgggaaaggtgaccaatttgggagttcaaaaggcttgtttcctcttaatcaacaccctgacacttggaacatcttgctgactctgttgttagtgcgccaacgctgccgccgcctaccaagagtgcacagtctatgcgctgaagcagcttgaccttcccaacgttgcccagtacctcgacgccggacacgctggctggctgggctggcccgccaacattgagaaggccgccgatgtcttcgccaaggtctacaacgatgctggcaagcctcgctccgtcaggggctttgctaccaatgtcagcaattacaacgctctccgactttcctccgctccttcctacacttctcgtgagtttcctgatctcttatccccggaatgaaccattttcatggagatttcgtgtcatggggccagggtgtgaaaatccgcaagatgacccacttctatctcaggggcttcctggacgttcaccatcaccacatgcatcaacaacttgaacactttgaacattcactaactttgcctcatagccaaccccaacttcgacgaggagcgttacatcaacgcctttgctcctctcctccgctccaggggcttcgatgccaagttcatcgtggatcagggtaagcttttcgctgctttttgtccagcttcctcgatagtggcagaacctaacgctcctctaggacgatccggaaagcagcccacgggccaggttgagtggggacattgggtaagctaccttccctgttccgtgttaggcgtcgtcggcagtctgtctcgcgagttgccccgcgtgataaccacatggtctgctgctcgaaagacacacttccgacaactcctggcacggcgatgaaagtattttattaactctaagttgtgtaatgcgcgcggtactggttttggcgcaagacctagcactaatactggcaacgctctcatcgatggtaagaagtcaaaaaggattattattgaaatttctgctgactttgtgtccagctgttgtctggatcaagcctggtggcgaagcagatggaacgagcgactccagcgctcccaggttcgacagtaagtaaccgctgggccccaattctccccttcagcgatcccagtggcatgatcattgcttcccctcctttcgttgtgtccatgaaccatcccaaagaggcaccagctaacgcatctgtaccaatagctttctgccgctctgcgagcagcgtcattcctgtaagatccttccctgtgtgtccggatcaaccagcttgtccagatctgacatattcgttcacaggcccccgaggctggaacttggttccaggcctacttccagatgctcctggagaacgccaacccctctttcctctaa

SEQ ID NO: 397 - DNA, 1443 bp, Unknown
  Fungal DNA
atggcttccaagatcttcctcggtgcgcttctcagcgccgccgccctcgccgctcctctcgaggagaggcagaactgcgccactgtctggggacaatgtggtggtaacggctggactggccctacctgctgcgctgccggctccgtctgctccgtcggaaacccctggtactctcagtgcctgcccggcaccgctcctccccctgcctcgtcgaccaccacctccaggcccccgagctccagcgccgcccctccttcttccaccgtcgtccctggaagcagcaccaggcccaccagcgtcgttgttcccaccaccaacgctggtgtcacttccaccagcagcggccctgcccccaccggcggcgccacctactctggcaaccccttcgtcggcgtcaaccagtgggccaacgcctactaccgctccgaggttctcagcctcgccgtcccctccctgactggccccctggccaccgccgccgccaaggtcgccgacgttcccaccttccagtggatggacacccgcgccaaggttccccttgttgatactgctcttggcgagatccgcgccgccaacgcccgcggcggcaacaacgccggtattttcgtcgtctacaacctgcccgaccgcgactgtgccgccgccgccagcaacggcgagcttgccattgccgatgatggtgtcaacaagtacaaggcctacatcgactccatccgtgctgtgcttctcaagtactccgacgtccgcaccatcctcgtcattgagcccgactcgctcgccaacatggtgaccaatttgggatgcgccaacgctgccgccgcctaccaagagtgcacagtctatgcgctgaagcagcttgaccttcccaacgttgcccagtacctcgacgccggacacgctggctggctgggctggcccgccaacattgagaaggccgccgatgtcttcgccaaggtctacaacgatgctggcaagcctcgctccgtcaggggctttgctaccaatgtcagcaattacaacgctctccgactttcctccgctccttcctacacttctcccaaccccaacttcgacgaggagcgttacatcaacgcctttgctcctctcctccgctccaggggcttcgatgccaagttcatcgtggatcagggacgatccggaaagcagcccacgggccaggttgagtggggacattggttgtgtaatgcgcgcggtactggttttggcgcaagacctagcactaatactggcaacgctctcatcgatgctgttgtctggatcaagcctggtggcgaagcagatggaacgagcgactccagcgctcccaggttcgacactttctgccgctctgcgagcagcgtcattcctgcccccgaggctggaacttggttccaggcctacttccagatgctcctggagaacgccaacccctctttcctctaa

SEQ ID NO: 398 - protein, 420 aa, Unknown
  Fungal protein
LPGTAPPPASSTTTSRPPSSSAAPPSSTVVPGSSTRPTSVVVPTTNAGVTSTSSGPAPTGGATYSGNPFVGVNQWANAYYRSEVLSLAVPSLTGPLATAAAKVADVPTFQWMDTRAKVPLVDTALGEIRAANARGGNNAGIFVVYNLPDRDCAAAASNGELAIADDGVNKYKAYIDSIRAVLLKYSDVRTILVIEPDSLANMVTNLGCANAAAAYQECTVYALKQLDLPNVAQYLDAGHAGWLGWPANIEKAADVFAKVYNDAGKPRSVRGFATNVSNYNALRLSSAPSYTSPNPNFDEERYINAFAPLLRSRGFDAKFIVDQGRSGKQPTGQVEWGHWLCNARGTGFGARPSTNTGNALIDAVVWIKPGGEADGTSDSSAPRFDTFCRSASSVIPAPEAGTWFQAYFQMLLENANPSFL

SEQ ID NO: 399 - DNA, 1753 bp, Unknown
  Fungal DNA
atgggtgttcataagcttttccttgccactgccctctttggccttgctgtcgcagccccaatcgttgaagagcgtgagtcctgtgctactcagtggtatgtagtcacgatatttgccaaatacatgaagttgtatggtcgcctactcaccactcatttagggggcaatgtggtggtatcaattggaatggtgttacttgctgcgagtctggcagctactgcagcaagattaacgattactacttccaatgcctttcagggagtaaccctaccacctcgaagaccagctcgctccccatttccaccaccactagcctcattactaagtcttcgtcgactgccagctctaccaaaactagtgctggctcctccaccacagcttctcctaccgttggcgccggtacggctacgtactccggcaatccctactctggagtgaacctatgggccaatggctactaccgttctgaggtcagcactctggctattcccagtctaagcggcgcaatggccactgctgccgccaaggttgctgaggtcccctctttccagtggatgtaagttgaacagctttttggatgagatctagcgattttaatggactgaactcttagggactcttacgcccatatctccctgatggaagatacacttgccgatatccgcaaggccaatcaggctggcggtaactatgccggccagttcgttgtctatgaccttcccgagcgggactgcgccgctgctgcctccaacggcgagtattctctcgacaacgacggtgccaacaagtacaagaattacatcaacagagttaagactatcatccagagctactccgacatccgcattattcttgttattggtaagtgagatgtcttgaattccgcgtcacgacatctaataagacaatcacagagcctgactcgctggctaacctcgtcaccaacatgaacgttgccaagtgttccaaagctcacgatgcttatctcagtctcaccaactacgctgtgactgctctcaacctccccaacgtcgccatgtaccttgatgctggccatgctggctggctcggctggcctgccaaccagagtcctgctgctcagctctttgctggtgtctacaaggacgctgggaaaccctcttcgctccgaggcctagtcacaaacgtcgccaactataacggctggagcctcagcaccgctcctagctacacccagggcaactccatttatgacgagaaatccttcattcatgccatgggccctcttctagagcaaaacggctgggcaggcgctcagttcataacggatcagggccgctcaggaaagcagccgaccggtcaagctcagtggggtgactggtgtaatgccaagggcactggtttcggtattcggccctctgccaacaccggcgacagcctccttgatgcattcgtctgggtcaagcccggcggtgagtccgatggcacttctgacaccactgctgcccgctatgattaccattgcggatactccgatgctttacagtaagttctttgcccttggctttcccccgttagctttcttccgcattgaaattattggtcacaaatctctaccatgtgtccgaaactctgacatggacgcttgaatacctattaatctgaaaaaaaatgctaacaattgtttcttccaaggcccgctcccgaggccggcacatggttccaggcttactttgtgcaacttcttacgaacgccaatccctcattcttgtaa

SEQ ID NO: 400 - DNA, 1425 bp, Unknown
  Fungal DNA
atgggtgttcataagcttttccttgccactgccctctttggccttgctgtcgcagccccaatcgttgaagagcgtgagtcctgtgctactcaggggcaatgtggtggtatcaattggaatggtgttacttgctgcgagtctggcagctactgcagcaagattaacgattactacttccaatgcctttcagggagtaaccctaccacctcgaagaccagctcgctccccatttccaccaccactagcctcattactaagtcttcgtcgactgccagctctaccaaaactagtgctggctcctccaccacagcttctcctaccgttggcgccggtacggctacgtactccggcaatccctactctggagtgaacctatgggccaatggctactaccgttctgaggtcagcactctggctattcccagtctaagcggcgcaatggccactgctgccgccaaggttgctgaggtcccctctttccagtggatggactcttacgcccatatctccctgatggaagatacacttgccgatatccgcaaggccaatcaggctggcggtaactatgccggccagttcgttgtctatgaccttcccgagcgggactgcgccgctgctgcctccaacggcgagtattctctcgacaacgacggtgccaacaagtacaagaattacatcaacagagttaagactatcatccagagctactccgacatccgcattattcttgttattgagcctgactcgctggctaacctcgtcaccaacatgaacgttgccaagtgttccaaagctcacgatgcttatctcagtctcaccaactacgctgtgactgctctcaacctccccaacgtcgccatgtaccttgatgctggccatgctggctggctcggctggcctgccaaccagagtcctgctgctcagctctttgctggtgtctacaaggacgctgggaaaccctcttcgctccgaggcctagtcacaaacgtcgccaactataacggctggagcctcagcaccgctcctagctacacccagggcaactccatttatgacgagaaatccttcattcatgccatgggccctcttctagagcaaaacggctgggcaggcgctcagttcataacggatcagggccgctcaggaaagcagccgaccggtcaagctcagtggggtgactggtgtaatgccaagggcactggtttcggtattcggccctctgccaacaccggcgacagcctccttgatgcattcgtctgggtcaagcccggcggtgagtccgatggcacttctgacaccactgctgcccgctatgattaccattgcggatactccgatgctttacagcccgctcccgaggccggcacatggttccaggcttactttgtgcaacttcttacgaacgccaatccctcattcttgtaa

SEQ ID NO: 401 - protein, 474 aa, Unknown
  Fungal protein
MGVHKLFLATALFGLAVAAPIVEERESCATQGQCGGINWNGVTCCESGSYCSKINDYYFQCLSGSNPTTSKTSSLPISTTTSLITKSSSTASSTKTSAGSSTTASPTVGAGTATYSGNPYSGVNLWANGYYRSEVSTLAIPSLSGAMATAAAKVAEVPSFQWMDSYAHISLMEDTLADIRKANQAGGNYAGQFVVYDLPERDCAAAASNGEYSLDNDGANKYKNYINRVKTIIQSYSDIRIILVIEPDSLANLVTNMNVAKCSKAHDAYLSLTNYAVTALNLPNVAMYLDAGHAGWLGWPANQSPAAQLFAGVYKDAGKPSSLRGLVTNVANYNGWSLSTAPSYTQGNSIYDEKSFIHAMGPLLEQNGWAGAQFITDQGRSGKQPTGQAQWGDWCNAKGTGFGIRPSANTGDSLLDAFVWVKPGGESDGTSDTTAARYDYHCGYSDALQPAPEAGTWFQAYFVQLLTNANPSFL

SEQ ID NO: 402 - DNA, 1209 bp, Unknown
  Fungal DNA
atgcgtgcttcgtcactgctcgtggccgtcgccaccgggggcctcgtctcggccgctcccaaccccgttcagccccggactgcccccaagggcgacgtgaacccgttccagggcaaggcccagtttgtcaaccccaaatgggccgccaagctggaccagaccctgcgctcgttcctgtggaagggcgacatcctcaacaccctcaagacgtacaaggtgcagcagaccagctccttcgtctgggtctccaagattgccgacctgtccaacatcgacgacgccatcgaggctgcccgtaaggcccagaagtggaccggcaagaagcagatcgtcggtctggtgctctacgacctcccggaccgcgactgcagcgctggcgagagcgccggcgagctcaagagcaccgagaacgggctcgagcgctacaagaacgagttcatcaagccctacgcccagaagctcgccgccgccaaggacctgaccttcgccgtcgtgctcgagcccgattccctgggcaacctggtcaccaacctcggagtcgagctctgcgccaaggccgccgacacctaccgcgccggcattgcccacgccattgcgagcctgcagtacgaccacgtccacctgtacatcgacgccgcccacggcggctggctcggctgggacgggaacctgcccctggcagccaaggagttctccaccgtcgtcaagctcgccggcgagggcaagaagatccgtggcttcgtcaccaacgtctccaactacaacccctacaacgccgccgtccgtgagaactacaccgagtggagcaactcgtgggacgagtctcactacgccacgtctctgaccccccatctcgtcgctgagggcctccccgcgcactttctcgtcgaccagggccgcgtccacctccctggcgcgcgcaaggagtggtaagtgtcacttgaccccgagatgcctgcctgcgaggaacttgatgactgacattgtctcaggggcgagtggtgcaacgtccagcccgctggcttcggcccggctccgtccaccaacaccaacaacacggttgtcgatgccctcgtctgggtcaagcccggcggcgagagcgacggtcaatgcggcatgaccggcgccccgaaggccggtgagtggttcgacgagtatgcccagatgcttgtcaagaacgccgactcgtctgtgttcaagctgtggtag

SEQ ID NO: 403 - DNA, 1146 bp, Unknown
  Fungal DNA
atgcgtgcttcgtcactgctcgtggccgtcgccaccgggggcctcgtctcggccgctcccaaccccgttcagccccggactgcccccaagggcgacgtgaacccgttccagggcaaggcccagtttgtcaaccccaaatgggccgccaagctggaccagaccctgcgctcgttcctgtggaagggcgacatcctcaacaccctcaagacgtacaaggtgcagcagaccagctccttcgtctgggtctccaagattgccgacctgtccaacatcgacgacgccatcgaggctgcccgtaaggcccagaagtggaccggcaagaagcagatcgtcggtctggtgctctacgacctcccggaccgcgactgcagcgctggcgagagcgccggcgagctcaagagcaccgagaacgggctcgagcgctacaagaacgagttcatcaagccctacgcccagaagctcgccgccgccaaggacctgaccttcgccgtcgtgctcgagcccgattccctgggcaacctggtcaccaacctcggagtcgagctctgcgccaaggccgccgacacctaccgcgccggcattgcccacgccattgcgagcctgcagtacgaccacgtccacctgtacatcgacgccgcccacggcggctggctcggctgggacgggaacctgcccctggcagccaaggagttctccaccgtcgtcaagctcgccggcgagggcaagaagatccgtggcttcgtcaccaacgtctccaactacaacccctacaacgccgccgtccgtgagaactacaccgagtggagcaactcgtgggacgagtctcactacgccacgtctctgaccccccatctcgtcgctgagggcctccccgcgcactttctcgtcgaccagggccgcgtccacctccctggcgcgcgcaaggagtggggcgagtggtgcaacgtccagcccgctggcttcggcccggctccgtccaccaacaccaacaacacggttgtcgatgccctcgtctgggtcaagcccggcggcgagagcgacggtcaatgcggcatgaccggcgccccgaaggccggtgagtggttcgacgagtatgcccagatgcttgtcaagaacgccgactcgtctgtgttcaagctgtggtag

SEQ ID NO: 404 - protein, 381 aa, Unknown
  Fungal protein
MRASSLLVAVATGGLVSAAPNPVQPRTAPKGDVNPFQGKAQFVNPKWAAKLDQTLRSFLWKGDILNTLKTYKVQQTSSFVWVSKIADLSNIDDAIEAARKAQKWTGKKQIVGLVLYDLPDRDCSAGESAGELKSTENGLERYKNEFIKPYAQKLAAAKDLTFAVVLEPDSLGNLVTNLGVELCAKAADTYRAGIAHAIASLQYDHVHLYIDAAHGGWLGWDGNLPLAAKEFSTVVKLAGEGKKIRGFVTNVSNYNPYNAAVRENYTEWSNSWDESHYATSLTPHLVAEGLPAHFLVDQGRVHLPGARKEWGEWCNVQPAGFGPAPSTNTNNTVVDALVWVKPGGESDGQCGMTGAPKAGEWFDEYAQMLVKNADSSVFKLW

SEQ ID NO: 405 - DNA, 1848 bp, Unknown
  Fungal DNA
atggcgaagttcctcctcaccgccgccctcgcggccaccgcgctggctgctcctgtcatcgaagagcgccagaactgcggctccgtctggtaagtgccgctgccagaacctgggttgacaggggcccaagctgacacgcccatgttcaggagccagtgtggcggcaatggctggagcggcgccacctgctgcgcgtccggcagctcttgcgtctaccagaacgactggtactcgcagtgcttgcccggcgcccaggtgacgaccactgccaagaccacctcgaccacctcgaccacgtccaaggcgagcagcaccagcaccaccaccagcaagaccagcacctcggtcggcaccaccacccgcacctcgacgagcaccactcccatcgtcacgccgccgacgagcaccgtccccggcggtgcctcgaccacggccagctactctggcaaccccttctccggggtccagctttgggccaacgactactatgcctctgaggtctcctcgctggccatccccagcttgaccggcgccatggccaccaaggctgccgccgttgccaaggttcccagcttccagtggctcgaccgcaacgtcactatcgacaccctgctcgtgcggactctgtcccagatccgggctgccaacaaggcgggcgccaaccccccttatgctggtaggtaccttgaataacaacccttgatcgttgaacgccaaaattgacgtcttcgaagcacaggtagtcgtttacgaccttccggaccgtgactggtatgttgccgtgaagctattcccaattcttgtggattttttccaccttttttccttttctttttctttttcttttcccccttcatttttcctcccttgctggtgttgagattttccgtgctggcggggaagccatctcatgtcaaagacagtcagtcatctctcttgaacctcagctaactctgcttccttcagcgccgccgctgcctccaacggcgagtgggcgatcgccaacgggggcgccgccaactacaaggggtacatcgacgccatccgcaagcacctcgtcgagtactcggacatccgcaccatcctggtcattgagcccgactcccttgccaacatggtcaccaacatgaacgtcgccaagtgcagcggcgccgccaccacctacaaggagctgaccgtctacgcgctcaagcagctcaacctgccccacgtcgccatgtacctcgatgccggccacgctggctggctcggctggcccgccaacatccagcccgctgctgacctgttcgctggcatctacaaggacgccggcaagcccgcctcggtccgcggcctggccaccaacgttgccaactacaacgcctggagcgccgcctcggccccgtcgtacaccacccccaacgccaactacgacgagaagcactacgtcgaggccttcagcccgctcctgaacgccgccggcttccccgctcacttcatcactgatactggccgcaacggcaagcagcccactggccagcagcagtggggtgactggtgcaacgtcaaggtaagccgcacacttcacaccccctttttttttttgtttggcccggcccgcatgactgacatggctcccagggcaccggcttcggcgctcgcccgtcggccaacaccggccacgacctcctcgatgccttcgtctgggtcaagcccggtggcgagtgcgacggcaccagcgacaccagcgccgcccgctacgactaccactgcggcctctcggatgctctccagcctgctcctgaggctggccagtggttccaggcctacttcgagcagctcctgaccaacgccaacccgcctttctaa

SEQ ID NO: 406 - DNA, 1452 bp, Unknown
  Fungal DNA
atggcgaagttcctcctcaccgccgccctcgcggccaccgcgctggctgctcctgtcatcgaagagcgccagaactgcggctccgtctgccagtgtggcggcaatggctggagcggcgccacctgctgcgcgtccggcagctcttgcgtctaccagaacgactggtactcgcagtgcttgcccggcgcccaggtgacgaccactgccaagaccacctcgaccacctcgaccacgtccaaggcgagcagcaccagcaccaccaccagcaagaccagcacctcggtcggcaccaccacccgcacctcgacgagcaccactcccatcgtcacgccgccgacgagcaccgtccccggcggtgcctcgaccacggccagctactctggcaaccccttctccggggtccagctttgggccaacgactactatgcctctgaggtctcctcgctggccatccccagcttgaccggcgccatggccaccaaggctgccgccgttgccaaggttcccagcttccagtggctcgaccgcaacgtcactatcgacaccctgctcgtgcggactctgtcccagatccgggctgccaacaaggcgggcgccaaccccccttatgctgtcgtttacgaccttccggaccgtgactgcgccgccgctgcctccaacggcgagtgggcgatcgccaacgggggcgccgccaactacaaggggtacatcgacgccatccgcaagcacctcgtcgagtactcggacatccgcaccatcctggtcattgagcccgactcccttgccaacatggtcaccaacatgaacgtcgccaagtgcagcggcgccgccaccacctacaaggagctgaccgtctacgcgctcaagcagctcaacctgccccacgtcgccatgtacctcgatgccggccacgctggctggctcggctggcccgccaacatccagcccgctgctgacctgttcgctggcatctacaaggacgccggcaagcccgcctcggtccgcggcctggccaccaacgttgccaactacaacgcctggagcgccgcctcggccccgtcgtacaccacccccaacgccaactacgacgagaagcactacgtcgaggccttcagcccgctcctgaacgccgccggcttccccgctcacttcatcactgatactggccgcaacggcaagcagcccactggccagcagcagtggggtgactggtgcaacgtcaagggcaccggcttcggcgctcgcccgtcggccaacaccggccacgacctcctcgatgccttcgtctgggtcaagcccggtggcgagtgcgacggcaccagcgacaccagcgccgcccgctacgactaccactgcggcctctcggatgctctccagcctgctcctgaggctggccagtggttccaggcctacttcgagcagctcctgaccaacgccaacccgcctttctaa

SEQ ID NO: 407 - protein, 483 aa, Unknown
  Fungal protein
MAKFLLTAALAATALAAPVIEERQNCGSVCQCGGNGWSGATCCASGSSCVYQNDWYSQCLPGAQVTTTAKTTSTTSTTSKASSTSTTTSKTSTSVGTTTRTSTSTTPIVTPPTSTVPGGASTTASYSGNPFSGVQLWANDYYASEVSSLAIPSLTGAMATKAAAVAKVPSFQWLDRNVTIDTLLVRTLSQIRAANKAGANPPYAVVYDLPDRDCAAAASNGEWAIANGGAANYKGYIDAIRKHLVEYSDIRTILVIEPDSLANMVTNMNVAKCSGAATTYKELTVYALKQLNLPHVAMYLDAGHAGWLGWPANIQPAADLFAGIYKDAGKPASVRGLATNVANYNAWSAASAPSYTTPNANYDEKHYVEAFSPLLNAAGFPAHFITDTGRNGKQPTGQQQWGDWCNVKGTGFGARPSANTGHDLLDAFVWVKPGGECDGTSDTSAARYDYHCGLSDALQPAPEAGQWFQAYFEQLLTNANPPF

SEQ ID NO: 408 - DNA, 1591 bp, Unknown
  Fungal DNA
atggcctacaagcttatcctcgccgcctttgcggctacagctcttgctgctcctgttgaagagcgccagtcctgcagcaacggagtttggtatgtctacgagtctcaactacaacgacatctacttacaatgaaacagggctcagtgtggtggccagaactggagcgggactccttgctgcaccagcggaaacaagtgtgtcaagctcaacgacttctactcccagtgccagcccggcactgctgagccttcatcgactgctgctggacccagctccaccactgccaccaagaccaccgccacgggtggaagctctactactgctggaggctctgtcacttctgcccctcctgcggccagtggcaacccatactctggtgttgatctttgggccaacagctactaccgctctgaggttatgaacttggctgttcctaagctgagcggtgccaaggctactgctgccgccaaggtcgctgatgttccctccttccagtggatgtaagtcaagcttaaatccaatattgattcgtatattgacaaggttcagggacacctacgaccacatttctctcatggaggatacccttgctgatatccgcaaggctaacaaggctggtggcaagtatgctggtcagttcgttgtctacgatcttcccaaccgtgactgcgctgctgctgcctccaatggagagtactccctcgacaaggacggtgccaacaagtacaaggcctacatcgccaagatcaagggcatcctccaggactactcagacaccaaggtcatccttgtcattggtaagtaaaccatcactcttgacattgcattagctaattccattgcagagcctgactctcttgctaacctggtcaccaacctgaacgtcgacaagtgtgccaaggccgagagtgcttacaaggagctcaccgtttacgctatcaaggaactcaacctccccaacgtctccatgtacctcgatgccggtcacggtggctggctcggctggcccgccaacattggccctgctgctaagctctacgcccagatctacaaggacgctggcaagccttctcgcgttcgcggtctcgtcaccaacgtcgccaactacaacggctggaagctctccaccaagcccgactacaccgagagcaaccccaactacgatgagcagcgatacatcaacgccttcgctcctcttctcgctcaggagggctggtccaatgtcaagtttatcgtcgaccagggccgatctggtaagcagcctactggtcagaaggctcagggcgattggtgcaacgccaagggtactggtttcggacttcgaccttccaccaacactggtgatgctctcgccgacgctttcgtctgggtcaagcctggtggtgagtctgatggtacctctgatacctctgctgctcgctatgactaccactgtggtctcgatgatgctctcaagtaagttgctccatccaatattctcactacatcccatgctaacatttcatcttcaggcccgctcctgaggccggaacctggttccaggcttacttcgagcagctcctcgacaacgccaacccctcattcctgtaa

SEQ ID NO: 409 - DNA, 1389 bp, Unknown
  Fungal DNA
atggcctacaagcttatcctcgccgcctttgcggctacagctcttgctgctcctgttgaagagcgccagtcctgcagcaacggagtttgggctcagtgtggtggccagaactggagcgggactccttgctgcaccagcggaaacaagtgtgtcaagctcaacgacttctactcccagtgccagcccggcactgctgagccttcatcgactgctgctggacccagctccaccactgccaccaagaccaccgccacgggtggaagctctactactgctggaggctctgtcacttctgcccctcctgcggccagtggcaacccatactctggtgttgatctttgggccaacagctactaccgctctgaggttatgaacttggctgttcctaagctgagcggtgccaaggctactgctgccgccaaggtcgctgatgttccctccttccagtggatggacacctacgaccacatttctctcatggaggatacccttgctgatatccgcaaggctaacaaggctggtggcaagtatgctggtcagttcgttgtctacgatcttcccaaccgtgactgcgctgctgctgcctccaatggagagtactccctcgacaaggacggtgccaacaagtacaaggcctacatcgccaagatcaagggcatcctccaggactactcagacaccaaggtcatccttgtcattgagcctgactctcttgctaacctggtcaccaacctgaacgtcgacaagtgtgccaaggccgagagtgcttacaaggagctcaccgtttacgctatcaaggaactcaacctccccaacgtctccatgtacctcgatgccggtcacggtggctggctcggctggcccgccaacattggccctgctgctaagctctacgcccagatctacaaggacgctggcaagccttctcgcgttcgcggtctcgtcaccaacgtcgccaactacaacggctggaagctctccaccaagcccgactacaccgagagcaaccccaactacgatgagcagcgatacatcaacgccttcgctcctcttctcgctcaggagggctggtccaatgtcaagtttatcgtcgaccagggccgatctggtaagcagcctactggtcagaaggctcagggcgattggtgcaacgccaagggtactggtttcggacttcgaccttccaccaacactggtgatgctctcgccgacgctttcgtctgggtcaagcctggtggtgagtctgatggtacctctgatacctctgctgctcgctatgactaccactgtggtctcgatgatgctctcaagcccgctcctgaggccggaacctggttccaggcttacttcgagcagctcctcgacaacgccaacccctcattcctgtaa

SEQ ID NO: 410 - protein, 462 aa, Unknown
  Fungal protein
MAYKLILAAFAATALAAPVEERQSCSNGVWAQCGGQNWSGTPCCTSGNKCVKLNDFYSQCQPGTAEPSSTAAGPSSTTATKTTATGGSSTTAGGSVTSAPPAASGNPYSGVDLWANSYYRSEVMNLAVPKLSGAKATAAAKVADVPSFQWMDTYDHISLMEDTLADIRKANKAGGKYAGQFVVYDLPNRDCAAAASNGEYSLDKDGANKYKAYIAKIKGILQDYSDTKVILVIEPDSLANLVTNLNVDKCAKAESAYKELTVYAIKELNLPNVSMYLDAGHGGWLGWPANIGPAAKLYAQIYKDAGKPSRVRGLVTNVANYNGWKLSTKPDYTESNPNYDEQRYINAFAPLLAQEGWSNVKFIVDQGRSGKQPTGQKAQGDWCNAKGTGFGLRPSTNTGDALADAFVWVKPGGESDGTSDTSAARYDYHCGLDDALKPAPEAGTWFQAYFEQLLDNANPSFL

SEQ ID NO: 411 - DNA, 1660 bp, Unknown
  Fungal DNA
atggctgccaaactccttctcaccgccgcccttgcggccaccgccctggctgcccctgttgttgaggagcgccagaactgcggctccgtttggtgagtattgctccaaatatgggcaagaggcctcggctgacacggggatatgtaggagccagtgtggcggcaatggctggagcggcgccacctgctgcgcttcgggcagcacttgcgttgcccagaacccgtggtactcgcagtgcctgcctaacagccaggtgcctacctctgctatcgtgtcgacgacatccaagagcagcagcaccagcagcagcaccagcagcaccagcaaggccactagcacctccatcagcaccagcagccgcagctctgcgtcgaccaccaccactcccgtggtcacgcccactacgagcattcccggcggtgcttcggtgacggccagctactctggcaaccccttctctggggtgcagctgtgggccaacgactactatgcctccgaggtccacaccctggccatccccagcatgaccggtgccatggcgaccaaggccgccgctgttgccaaggttcccagcttccagtggctcgaccggaacatcacgattgatacgctgatgactaagacgctggctcaaatccgggccgcgaaccaggccggtgccaaccccccctatgccggtaagtcaacaccacatttctcgatcattttgagcttcagaactctcaaattaacaaacgagcagctcaattggtcgtttatgatcttccggaccgtgactgcgctgccgctgcttctaacggcgagtgggcgatcgcgaatggtggtgcggccaactacaagtcctacatcgatgccatccgcaagcacatcatcgagtactcggacatccgcacgattctcgtcattgagcctgattccctggccaacatggtcaccaacatgaacgtccagaagtgcagcggcgccgcgacgacctacaaggagttgaccgtctacgccctcaagcagctcaaccttcccaacgtggccatgtacctcgacgctggccacgccggctggctcggctggcccgccaacattcagcccgctgctgatctctttgctggcatctacaaggacgctggcaagcccgcggccgtccgcggcctggccaccaacgttgccaactacaacgcctggagcgtcgcctcggccccgtcgtacaccagccccaaccccaactacgacgagaagcactacgtcgaggccttcagcccgctcctcaacgcggccggcttccctgctcgcttcatcaccgacactggccgcagcggcaagcagcccactggtatgtcttttccatctcctgaatgccgcgcccgcagccgccgaaacagactctaacaacattcctctaggccaaaccgagtggggccactggtgcaacgccaagggtaccggcttcggtgcccgcccgtcggccaacaccggccacgagctcctcgatgccttcgtctgggtcaagcccggtggcgagtgcgacggcaccagcgacaccagcgccgcccgctacgactaccactgcggccttgccgatgccctccagcccgctcccgaggctggccagtggttccaggcctacttcgagcagctcctcaccaacgccaacccccccttctaa

SEQ ID NO: 412 - DNA, 1470 bp, Unknown
  Fungal DNA
atggctgccaaactccttctcaccgccgcccttgcggccaccgccctggctgcccctgttgttgaggagcgccagaactgcggctccgtttgccagtgtggcggcaatggctggagcggcgccacctgctgcgcttcgggcagcacttgcgttgcccagaacccgtggtactcgcagtgcctgcctaacagccaggtgcctacctctgctatcgtgtcgacgacatccaagagcagcagcaccagcagcagcaccagcagcaccagcaaggccactagcacctccatcagcaccagcagccgcagctctgcgtcgaccaccaccactcccgtggtcacgcccactacgagcattcccggcggtgcttcggtgacggccagctactctggcaaccccttctctggggtgcagctgtgggccaacgactactatgcctccgaggtccacaccctggccatccccagcatgaccggtgccatggcgaccaaggccgccgctgttgccaaggttcccagcttccagtggctcgaccggaacatcacgattgatacgctgatgactaagacgctggctcaaatccgggccgcgaaccaggccggtgccaaccccccctatgccgcagctcaattggtcgtttatgatcttccggaccgtgactgcgctgccgctgcttctaacggcgagtgggcgatcgcgaatggtggtgcggccaactacaagtcctacatcgatgccatccgcaagcacatcatcgagtactcggacatccgcacgattctcgtcattgagcctgattccctggccaacatggtcaccaacatgaacgtccagaagtgcagcggcgccgcgacgacctacaaggagttgaccgtctacgccctcaagcagctcaaccttcccaacgtggccatgtacctcgacgctggccacgccggctggctcggctggcccgccaacattcagcccgctgctgatctctttgctggcatctacaaggacgctggcaagcccgcggccgtccgcggcctggccaccaacgttgccaactacaacgcctggagcgtcgcctcggccccgtcgtacaccagccccaaccccaactacgacgagaagcactacgtcgaggccttcagcccgctcctcaacgcggccggcttccctgctcgcttcatcaccgacactggccgcagcggcaagcagcccactggccaaaccgagtggggccactggtgcaacgccaagggtaccggcttcggtgcccgcccgtcggccaacaccggccacgagctcctcgatgccttcgtctgggtcaagcccggtggcgagtgcgacggcaccagcgacaccagcgccgcccgctacgactaccactgcggccttgccgatgccctccagcccgctcccgaggctggccagtggttccaggcctacttcgagcagctcctcaccaacgccaacccccccttctaa

SEQ ID NO: 413 - protein, 489 aa, Unknown
  Fungal protein
MAAKLLLTAALAATALAAPVVEERQNCGSVCQCGGNGWSGATCCASGSTCVAQNPWYSQCLPNSQVPTSAIVSTTSKSSSTSSSTSSTSKATSTSISTSSRSSASTTTTPVVTPTTSIPGGASVTASYSGNPFSGVQLWANDYYASEVHTLAIPSMTGAMATKAAAVAKVPSFQWLDRNITIDTLMTKTLAQIRAANQAGANPPYAAAQLVVYDLPDRDCAAAASNGEWAIANGGAANYKSYIDAIRKHIIEYSDIRTILVIEPDSLANMVTNMNVQKCSGAATTYKELTVYALKQLNLPNVAMYLDAGHAGWLGWPANIQPAADLFAGIYKDAGKPAAVRGLATNVANYNAWSVASAPSYTSPNPNYDEKHYVEAFSPLLNAAGFPARFITDTGRSGKQPTGQTEWGHWCNAKGTGFGARPSANTGHELLDAFVWVKPGGECDGTSDTSAARYDYHCGLADALQPAPEAGQWFQAYFEQLLTNANPPF

SEQ ID NO: 414 - DNA, 1332 bp, Unknown
  Fungal DNA
atgcgttcctttgctctcctcgccggcctcctcgccaccgcctcggctcttcccgctcttgaaccgcggcagtctggcaaccccttctctggccgcaccctgctcgtcaacccaaactacagcaagtcgcttgagcaaactcgccaggccttggtgtccgctggagaccagactagtgccgccaaggtgaagttcgttcaggagaaggtcggcaccttcgtctggatctccaacattgccctcctggccgatatcgacaacgccattgccaatgcccgtgccgcgaaggcgaagggcgagaaccccattgtcggtcttgttctatacaacatccccgaccgcgactgcagtgccggccactcttccggtgagctgagcttgtcccagaacggcctcgctcggtaccgcaccgagtacgtgcagccgttcgcccagaagctcaaggcagcttcggatctccagtttgccgttgttctcgagcccgatgccatgggcaacatggtcactggcaccagcgccttctgccaaaacgcccgtgggccccagcaggacggtattgcctacgccatccagcagctccaggccagcaacgtccacctctaccttgatgtggccaacggcggttggcttggctggccggacaacctcaaactgagtaagtctcattcttttgtgcgagtgcggaagaggggcattcactaaccaaccaccacctcaccagccgccgacgtggtcgccaccattctccaaaaggcaggcggcaacaaccgcatccggggttacgcgagcaacgtctccaactacaacccctacaagaccaacaacccgccggcctacaccgagggcagcccgtcgcccgacgagtcccgctacgccgacaacctcgcggcggccttcggccagcgcggcctcccgaccaagttcatcatcgaccagggccgcgtcgcactcgacggcgcgcgcaaggagtggggcgagtggtgcaacgtcttcccctcgggcttcggccagcccttcaccaccaacaccggcaacgccaacgtcgacgccatcgtctggatcaagcccggcggtgagtccgacggccagtgcggcatggcgggcgccccgcgcgccggcgcctggtttgacgcgttcgcgcagatgctcgccaagaatgcgcacccggacatcagcgccggtggcaataacggcggcggcagcaacccgaacccgggcggtaactgcggcgctaggtggtcgcagtgtggagggcaggggtggagcggccctacctgctgctccgagggcacttgccaggtgtccaacccgtggtactcgcagtgcttgtaa

SEQ ID NO: 415 - DNA, 1266 bp, Unknown
  Fungal DNA
atgcgttcctttgctctcctcgccggcctcctcgccaccgcctcggctcttcccgctcttgaaccgcggcagtctggcaaccccttctctggccgcaccctgctcgtcaacccaaactacagcaagtcgcttgagcaaactcgccaggccttggtgtccgctggagaccagactagtgccgccaaggtgaagttcgttcaggagaaggtcggcaccttcgtctggatctccaacattgccctcctggccgatatcgacaacgccattgccaatgcccgtgccgcgaaggcgaagggcgagaaccccattgtcggtcttgttctatacaacatccccgaccgcgactgcagtgccggccactcttccggtgagctgagcttgtcccagaacggcctcgctcggtaccgcaccgagtacgtgcagccgttcgcccagaagctcaaggcagcttcggatctccagtttgccgttgttctcgagcccgatgccatgggcaacatggtcactggcaccagcgccttctgccaaaacgcccgtgggccccagcaggacggtattgcctacgccatccagcagctccaggccagcaacgtccacctctaccttgatgtggccaacggcggttggcttggctggccggacaacctcaaactgaccgccgacgtggtcgccaccattctccaaaaggcaggcggcaacaaccgcatccggggttacgcgagcaacgtctccaactacaacccctacaagaccaacaacccgccggcctacaccgagggcagcccgtcgcccgacgagtcccgctacgccgacaacctcgcggcggccttcggccagcgcggcctcccgaccaagttcatcatcgaccagggccgcgtcgcactcgacggcgcgcgcaaggagtggggcgagtggtgcaacgtcttcccctcgggcttcggccagcccttcaccaccaacaccggcaacgccaacgtcgacgccatcgtctggatcaagcccggcggtgagtccgacggccagtgcggcatggcgggcgccccgcgcgccggcgcctggtttgacgcgttcgcgcagatgctcgccaagaatgcgcacccggacatcagcgccggtggcaataacggcggcggcagcaacccgaacccgggcggtaactgcggcgctaggtggtcgcagtgtggagggcaggggtggagcggccctacctgctgctccgagggcacttgccaggtgtccaacccgtggtactcgcagtgcttgtaa

SEQ ID NO: 416 - protein, 421 aa, Unknown
  Fungal protein
MRSFALLAGLLATASALPALEPRQSGNPFSGRTLLVNPNYSKSLEQTRQALVSAGDQTSAAKVKFVQEKVGTFVWISNIALLADIDNAIANARAAKAKGENPIVGLVLYNIPDRDCSAGHSSGELSLSQNGLARYRTEYVQPFAQKLKAASDLQFAVVLEPDAMGNMVTGTSAFCQNARGPQQDGIAYAIQQLQASNVHLYLDVANGGWLGWPDNLKLTADVVATILQKAGGNNRIRGYASNVSNYNPYKTNNPPAYTEGSPSPDESRYADNLAAAFGQRGLPTKFIIDQGRVALDGARKEWGEWCNVFPSGFGQPFTTNTGNANVDAIVWIKPGGESDGQCGMAGAPRAGAWFDAFAQMLAKNAHPDISAGGNNGGGSNPNPGGNCGARWSQCGGQGWSGPTCCSEGTCQVSNPWYSQCL

SEQ ID NO: 417 - DNA, 1203 bp, Unknown
  Fungal DNA
atgcgtccttcgtcactgctcgtggccgtcgccaccgggggcctcgtctctgcggctcccaaccccgtgcagccccggacccccaagggagacgtgaaccccttccagggcaagactcagttcgtcaaccccacatgggcggccaagctggaccagaccatgcgggcgttcctgtggaagggtgatcttctcaacaccctaaagacgtacaaggtccagcagaccagctccttcgtgtgggtgtccaagattgccgacctgcccaacatcgacgccgccatcgccgccgctcgcaaggcccagaagtggaccggcaagaagcagatcgtcggtctggtgctctacgacctgccggaccgcgactgcagcgctggcgagagcgccggcgagctcaagagcgccgaaaacggcctggagcgctacaagaaggagttcatcaagccctacgccgagaagctcgccgctgccaaggacctcaccttcgccgtcgtgctcgagcccgattccctcggcaacctggtcaccaacatgggcatcgagctctgcgccaaggccgccgacacctaccgcgccggcattgcccatgccattgcgagcctgcagtacgaccacgtcaacctgtacatcgacgctgcccatggcggctggctcggctggaacgacaacctgcccctcgcggccaaggagtttgccaccgtcgtcaagctggccggcccgggcaagaaggtccgcggcttcgtcaccaacgtgtccaactacaaccccttcaacgccgccgtgcgtgagaactacaccgagtggagcaactcgtgggacgagtctcactacgccacctctctggcccctcacctcgaagctgagggtctcccggcccacttcatcgtcgaccagggccgtgtccaccttccgggtgcccgcaaggagtggtgagtaccaagccaacaccactcaggagaatctaccgttcgattgctaacatgtcccaggggcgagtggtgcaacgtccagcccgccggctttggcccggcacccaccaccaacaccaacaacaccgttgtcgacgccctcgtgtgggtcaagcctggcggcgagagcgacggcgagtgcggtatgaccggcgccccgagggccggagagtggttcgacgagtatgcccagatgctcgtcaagaacgcggacccgtctgtgttcaagtggttttag

SEQ ID NO: 418 - DNA, 1143 bp, Unknown
  Fungal DNA
atgcgtccttcgtcactgctcgtggccgtcgccaccgggggcctcgtctctgcggctcccaaccccgtgcagccccggacccccaagggagacgtgaaccccttccagggcaagactcagttcgtcaaccccacatgggcggccaagctggaccagaccatgcgggcgttcctgtggaagggtgatcttctcaacaccctaaagacgtacaaggtccagcagaccagctccttcgtgtgggtgtccaagattgccgacctgcccaacatcgacgccgccatcgccgccgctcgcaaggcccagaagtggaccggcaagaagcagatcgtcggtctggtgctctacgacctgccggaccgcgactgcagcgctggcgagagcgccggcgagctcaagagcgccgaaaacggcctggagcgctacaagaaggagttcatcaagccctacgccgagaagctcgccgctgccaaggacctcaccttcgccgtcgtgctcgagcccgattccctcggcaacctggtcaccaacatgggcatcgagctctgcgccaaggccgccgacacctaccgcgccggcattgcccatgccattgcgagcctgcagtacgaccacgtcaacctgtacatcgacgctgcccatggcggctggctcggctggaacgacaacctgcccctcgcggccaaggagtttgccaccgtcgtcaagctggccggcccgggcaagaaggtccgcggcttcgtcaccaacgtgtccaactacaaccccttcaacgccgccgtgcgtgagaactacaccgagtggagcaactcgtgggacgagtctcactacgccacctctctggcccctcacctcgaagctgagggtctcccggcccacttcatcgtcgaccagggccgtgtccaccttccgggtgcccgcaaggagtggggcgagtggtgcaacgtccagcccgccggctttggcccggcacccaccaccaacaccaacaacaccgttgtcgacgccctcgtgtgggtcaagcctggcggcgagagcgacggcgagtgcggtatgaccggcgccccgagggccggagagtggttcgacgagtatgcccagatgctcgtcaagaacgcggacccgtctgtgttcaagtggttttag

SEQ ID NO: 419 - protein, 380 aa, Unknown
  Fungal protein
MRPSSLLVAVATGGLVSAAPNPVQPRTPKGDVNPFQGKTQFVNPTWAAKLDQTMRAFLWKGDLLNTLKTYKVQQTSSFVWVSKIADLPNIDAAIAAARKAQKWTGKKQIVGLVLYDLPDRDCSAGESAGELKSAENGLERYKKEFIKPYAEKLAAAKDLTFAVVLEPDSLGNLVTNMGIELCAKAADTYRAGIAHAIASLQYDHVNLYIDAAHGGWLGWNDNLPLAAKEFATVVKLAGPGKKVRGFVTNVSNYNPFNAAVRENYTEWSNSWDESHYATSLAPHLEAEGLPAHFIVDQGRVHLPGARKEWGEWCNVQPAGFGPAPTTNTNNTVVDALVWVKPGGESDGECGMTGAPRAGEWFDEYAQMLVKNADPSVFKWF

SEQ ID NO: 420 - DNA, 1629 bp, Agaricus bisporus ATCC 62489
atgttcaaattcgctgctctactagctttggcttcgctcgtcccaggctttgtccaggctcagtcacctgtatggggtcaatgcggtggtaatggctggagtaagtgatgacacaggaagggaatttatctcacctgtggttcatatgatagctggcccgacaacctgcgcttcgggctcaacctgcgtgaagcagaatgatttctattctcagtgcctgtacgtatatactttatgtcgaagcaaccacagagatcaaacaaaacgtagtcccaacaatcaagctcctccttccacaactacacagcctggcaccacaccccccgccaccaccacttccggcggcacaggacctacttcaggtgctggaaacccttataccggtaaaacggtacgtgattacttgtcacctctttgccaacattttcatctttctaacaggtctggctgtcacccttctatgctgacgaggtcgcgcaagcggccgctgatatatccaatcctagtttggcaaccaaggctgcttcggttgctaaaatccctaccttcacttggtttgatacggttgccaaggttcccgaccttggtggctaccttgccgatgcccagtccaagaaccagctcgttcaaattgttgtctacgatctgcccgaccgtgactgcgccgccctcgcctctaacggagagttctctctcgccaatgatggcctcaacaagtataagaactatgttgaccagattgcggcccagattaagcgtatggtttctgcattccgtcatgtttccgaacgctaacttggaattttcagagttccctgacgtatccgtcgtggctgtcattgagcctgactcgctcgctaatttggtcacaaatttgaatgtccaaaaatgtgctaacgcccaaagcgcttacaaggagggtgtcatttacgctatccaaaaacttgacgcagttggtgttaccatgtacatcgatgctggtcatgctggatggttgggctggcctgctaatctgtcccctgccgcccaactcttcgcccaaatctacagagacgctggctcgcccagaaacctccgtggtatcgccacgaacgttgccaacttcaacgcccttagagcttcctctcccgatcctatcactcagggcaacagtaattatgacgaaatacactacattgaagtcagttgcggcatttgctatgatcactgttgttgggtgctaatatcaattacaggctcttgctcccatgctcagtaatgctggtttccctgctcacttcatcgtcgaccaaggtcgctcgggtgttcagaatatcagagaccagtggggcgactggtgcaacgtcaagggtgctggcttcggtcaacgaccgacaacaaacactggctcctcgctcatcgatgctattgtctgggtcaagccaggtggcgaatgcgacggtacctcagacagttcatcccctcggttcgactcgcattgctctcttaggtgagtatatcaccttcaattgtttgggtctattgctaacgaagcttcgcagcgacgctcatcaacccgctcctgaggctggtacctggttccaagcttactttgagaccttggttgcgaatgccaaccctgccctttaa

SEQ ID NO: 421 - DNA, 1317 bp, Agaricus bisporus ATCC 62489
atgttcaaattcgctgctctactagctttggcttcgctcgtcccaggctttgtccaggctcagtcacctgtatggggtcaatgcggtggtaatggctggactggcccgacaacctgcgcttcgggctcaacctgcgtgaagcagaatgatttctattctcagtgccttcccaacaatcaagctcctccttccacaactacacagcctggcaccacaccccccgccaccaccacttccggcggcacaggacctacttcaggtgctggaaacccttataccggtaaaacggtctggctgtcacccttctatgctgacgaggtcgcgcaagcggccgctgatatatccaatcctagtttggcaaccaaggctgcttcggttgctaaaatccctaccttcacttggtttgatacggttgccaaggttcccgaccttggtggctaccttgccgatgcccagtccaagaaccagctcgttcaaattgttgtctacgatctgcccgaccgtgactgcgccgccctcgcctctaacggagagttctctctcgccaatgatggcctcaacaagtataagaactatgttgaccagattgcggcccagattaagcagttccctgacgtatccgtcgtggctgtcattgagcctgactcgctcgctaatttggtcacaaatttgaatgtccaaaaatgtgctaacgcccaaagcgcttacaaggagggtgtcatttacgctatccaaaaacttgacgcagttggtgttaccatgtacatcgatgctggtcatgctggatggttgggctggcctgctaatctgtcccctgccgcccaactcttcgcccaaatctacagagacgctggctcgcccagaaacctccgtggtatcgccacgaacgttgccaacttcaacgcccttagagcttcctctcccgatcctatcactcagggcaacagtaattatgacgaaatacactacattgaagctcttgctcccatgctcagtaatgctggtttccctgctcacttcatcgtcgaccaaggtcgctcgggtgttcagaatatcagagaccagtggggcgactggtgcaacgtcaagggtgctggcttcggtcaacgaccgacaacaaacactggctcctcgctcatcgatgctattgtctgggtcaagccaggtggcgaatgcgacggtacctcagacagttcatcccctcggttcgactcgcattgctctcttagcgacgctcatcaacccgctcctgaggctggtacctggttccaagcttactttgagaccttggttgcgaatgccaaccctgccctttaa

SEQ ID NO: 422 - protein, 438 aa, Agaricus bisporus ATCC 62489
MFKFAALLALASLVPGFVQAQSPVWGQCGGNGWTGPTTCASGSTCVKQNDFYSQCLPNNQAPPSTTTQPGTTPPATTTSGGTGPTSGAGNPYTGKTVWLSPFYADEVAQAAADISNPSLATKAASVAKIPTFTWFDTVAKVPDLGGYLADAQSKNQLVQIVVYDLPDRDCAALASNGEFSLANDGLNKYKNYVDQIAAQIKQFPDVSVVAVIEPDSLANLVTNLNVQKCANAQSAYKEGVIYAIQKLDAVGVTMYIDAGHAGWLGWPANLSPAAQLFAQIYRDAGSPRNLRGIATNVANFNALRASSPDPITQGNSNYDEIHYIEALAPMLSNAGFPAHFIVDQGRSGVQNIRDQWGDWCNVKGAGFGQRPTTNTGSSLIDAIVWVKPGGECDGTSDSSSPRFDSHCSLSDAHQPAPEAGTWFQAYFETLVANANPAL

SEQ ID NO: 423 - DNA, 1434 bp, Unknown
  Obtained from environmental sample
gtgagcaacccagcaagcccgcccgccgtcggcgtcctcgacgccggtccggccctcaccttcccgcccggcttcctctggggcgcggccaccgccgcgtaccagatcgagggcgcggcgacggagggcggccgtgccccgtcgatctgggacaccttcagccacaccgagggccggacggtggccgggcacaccggcgacgtggcgtgcgaccactaccaccggatgccggacgacgtgcggttgatggccgacctgggcctgcagtcgtaccgcttctcggtgagctggccgcgggtgcagccgggcggcaccggcggggtcaaccaggagggcatggacttctaccgccgcctggtcgacgaactgctcggccacggcatcgagccgtggctgacgctctaccactgggacctgccgcagccgctggaggacgcgggcggctggccggcccgggacaccgccgcccgcttcgccgagtactcccacctggtcgccgaggcgctcggtgaccgggtgaagtacttcaccacgctgaacgagccgtggtgctcggcgttcctcggttacggctccggcgtgcacgctccgggccgtaacgacggcgcggacgcggtccgggccgggcaccacctgatgctgggccacggcctggccgtgcaggcggtgcgggcggcccgcccggaggcgcagctcggcatcaccgtcaacctgtacccggtcaccccggcgagcgaatcggcggcggacgccgacgcggcccgccggatcgacgcgctggccaaccggttcttcctggacccggtgctgcgcggggcgtacccggcggacctcgtcgcggacctgcgtcaggtcaccgacatggggcacgtgcgcgacggtgacctggcgaccatctccaccccgctggacatggtcgggatcaactactacagccggcacgtggtggccgcgcccgtcgagggcgcggagccggagccctactggcgggcgccgtcctgctggccgggcagcgaggacgtgcggttcgtcacccggggcgtcccggtgacggacatggactgggagatcgacgccccgggcctggtggagacgctggagcgggtgcaccgggagtacaccgacctgccgctctacgtcaccgagaacggctcggcgttcgtcgacgaggtcgtcgacggccgggtggacgacccggaccggctggcctacttctccgcgcacctgcgcgcggcgcacgccgcgatcgaggccggcgtgccgctcaagggctacttcgcctggtcgctcctggacaacttcgagtgggcctggggctacacgaagcggttcggcatggtctatgtcgactacgacagccaggcccggatcgcgaagtccagcgccaggtggtacgccgacgtgatccgacgcaacggactgcccgcacaataa

SEQ ID NO: 424 - protein, 477 aa, Unknown
  Obtained from environmental sample
  DOMAIN (17)...(474): Glycosyl hydrolase family 1
  SITE (25)...(39): Glycosyl hydrolases family 1 N-terminal signature. Prosite id = PS00653
  SITE (388)...(391): N-glycosylation site. Prosite id = PS00001
MSNPASPPAVGVLDAGPALTFPPGFLWGAATAAYQIEGAATEGGRAPSIWDTFSHTEGRTVAGHTGDVACDHYHRMPDDVRLMADLGLQSYRFSVSWPRVQPGGTGGVNQEGMDFYRRLVDELLGHGIEPWLTLYHWDLPQPLEDAGGWPARDTAARFAEYSHLVAEALGDRVKYFTTLNEPWCSAFLGYGSGVHAPGRNDGADAVRAGHHLMLGHGLAVQAVRAARPEAQLGITVNLYPVTPASESAADADAARRIDALANRFFLDPVLRGAYPADLVADLRQVTDMGHVRDGDLATISTPLDMVGINYYSRHVVAAPVEGAEPEPYWRAPSCWPGSEDVRFVTRGVPVTDMDWEIDAPGLVETLERVHREYTDLPLYVTENGSAFVDEVVDGRVDDPDRLAYFSAHLRAAHAAIEAGVPLKGYFAWSLLDNFEWAWGYTKRFGMVYVDYDSQARIAKSSARWYADVIRRNGLPAQ

SEQ ID NO: 425 - DNA, 1035 bp, Unknown
  Obtained from environmental sample
atgagagatataagtcctgcagagctggttgccgagatgacaaccggatggaatcttggaaatacctttgatgcatatggaaaaggcggtcttgatgatgagacaggctggggaaatccctatactactaaggaaatgattgatgtagtctgtgaaaaggggtttaattctatcagaatcccaataacctgggctgatcatatgggtgctgctcctgactatacagtagatgaggactggatgaaccgtgtagaagaggttgtaaattatgctcttgatgacgggatgtatgtcattatcaattcccaccacgaagagtcctggagaatccctgatgatgcacacattgatgcagtagatgaacaggttggaaagctctgggtccagatagctgagaggttcagggattatggcgaccatcttatttttgaggggctaaatgagccacgtgttaagggcggtgaaaatgagtggaatggcggaacgaccgaaggacgtaaatgcctggacagacttaatcagacttttgtagattcagtaagatcaacaggtggaaataatgaaaaaagacttgtacttataacaagctttgcatcctcacacgtaatacagacaataggaagccttaaaattccaagcgacgatcaccttgctgtttcaatccatgcctatacgccttatgattttacatatgcctccggcacctcctctgagcttttaacctgggatggttccagaaaaagtgatattgcttctgttattggtgatgtaaaaagaatctttatagacaagggtattcctgtccttatgacagaatatggtgcagttgataaagatggcaactccggtgatgtaagcgcctgggtaactgagtatttaacacgcgcaaaaaaagccggtatcccatgcttttggtgggacaatggcctgtatgaatcaggtgatgaacattttgctatattcaaccgcaatgacctgacctggtacagagaagacgtcgttgatgccattatggctgtctactatgcccaataa

SEQ ID NO: 426 - protein, 344 aa, Unknown
  Obtained from environmental sample
  DOMAIN (20)...(316): Cellulase (glycosyl hydrolase family 5)
  SITE (1)...(4): Tubulin-beta mRNA autoregulation signal. Prosite id = PS00228
  SITE (143)...(152): Glycosyl hydrolases family 5 signature. Prosite id = PS00659
  SITE (175)...(178): N-glycosylation site. Prosite id = PS00001
MRDISPAELVAEMTTGWNLGNTFDAYGKGGLDDETGWGNPYTTKEMIDVVCEKGFNSIRIPITWADHMGAAPDYTVDEDWMNRVEEVVNYALDDGMYVIINSHHEESWRIPDDAHIDAVDEQVGKLWVQIAERFRDYGDHLIFEGLNEPRVKGGENEWNGGTTEGRKCLDRLNQTFVDSVRSTGGNNEKRLVLITSFASSHVIQTIGSLKIPSDDHLAVSIHAYTPYDFTYASGTSSELLTWDGSRKSDIASVIGDVKRIFIDKGIPVLMTEYGAVDKDGNSGDVSAWVTEYLTRAKKAGIPCFWWDNGLYESGDEHFAIFNRNDLTWYREDVVDAIMAVYYAQ

SEQ ID NO: 427 - DNA, 2820 bp, Unknown
  Obtained from environmental sample
atgtcctgccgcaccctgatgagtaggcgtgtaggatggggacttttattgtggggaggtttattcctcagaaccggttcggttacaggacaaacttacaattatgccgaagtcctgcagaaatctatgtttttctacgaatgtcaggagtctaaaattgccccgggcaatcgggtgacatggcgagctaatgcagccatgaacgatgggagcgatgttggaaaagacctgacaggaggatggtttgatgcaggtgaccatgtgaaatttaattttcccatggcgtttaccgctacggcgctggcgtggggagctattgactttgctcagggatacattagttccgggcaaatgcaatacctgaaacgtaatctgcgctacgtcaatgactatttcattaaatgtcacacagcccccaacgaattgtatggtcaggtgggtaatggaggccttgaccatgccttttggggaccacccgaagtcatgcgcatggctaggcctgcctataaaattgatgcgtcaaaacccggatcagatctggctgccgaaacagctgctgcaatggctgccgccagcattgttttcaaatccgacgatcctacctatagcgctactttgctgaatcatgcaaaacagctgttttcttttgccgaaacctataaaggaaaatattccgacgctattaccgatgctgcaggatattataactcctggagcggctataacgatgaactggtatggggagctatatggctttaccgggctaccggcgatgcaacctatctatctaaggcagaatcctattacgacaatctgggtaatcagggtcaggaacccgttaaagcctacaaatggaccattgcatgggatgacaaatcctatggctgttatgccctactggccaaattgacaggtaaggaaaaatacaaaattgacgccgaacgttttctcgactattggaccgatggttataatggttcccggattacttataccccgggaggactcgctttcctcgatatatggggatcgttgcgctatgctatgaatactgcctttgttgctgcctactatgccgatgcagccacttcagctgctaaaaccacaaaatatctcaactttgctaaacaacaactgcattatgctcttggatccaatccgagcaacagaagctatgtctgtggctttggcaataatcctcccgttaatcctcaccatagaggtgcacacggagcatggtctaataatgttcaaggacctcctaccgaaacacgacatatcctctacggcgcattagtgggtggaccaggcagtaatgactcctatactgacgaccgatccaattacaccaataacgaagtagcatgtgactacaatgctcttttctccggactgcttgcaaagttcgtcattgattatggaggcacaccgttagccaacttccctgttcgtgaaaccccaaaagatgaatatttcgttgaagcaaaagcaaacgctacaggaaccaatttctccgaatggacggtatgggtatacaaccacactgcatggccagcccgtgaaggttctgaatataaattcagattatacgtaaatatttcggaaggactggctgcaggctatactgcctcaaattatgttgtgcaaaccaataatgccggtgtggtaaactttacccaacttttagctgctgatgcagctaacggcatctattataccgaagtaacctttaaacctggtaccgaaatttatcctggcgggcaacagtatgacaagaaggaagctcagatgcgtattagtttgcccaatgctccggcttctgcatgggatccgactaacgacccgtcatgggcgggaatcacctctaccttgaaacaaatgccgggtatacccatgtatgtagatggtgtaaaggtatttggtaatgagcctgtcccaggtcagacagttcccgtcaccggagtaaccgtatcgcctaccaccctgagtctgactgtaggacagaccagtacactcaccgctaccgtatcgccggctaatgctaccaacaaaaacgtcacctggagcagcagcaataccagcgtagccacggtaagctcaacaggcgttgtcacagccgtagcagccggttcggccaccatcaccgtaaccacagtcgatggcgctaaaacagccacctgcgccgtaacggtaacaggcagcaccaacgttcccgtcaccggagtaaccgtatcgcccaccacgctgagtctgaccgtagggcagaccgctaccctcaccgctaccgtatcgccggctaatgctaccaacaagaacgttacctggagcagcagcaataccagcgtagccacggtaagttcaacaggcgtagttactgccgtagcggccggttcggccaccatcaccgtaaccaccgtcgatggagctaaaaccgctacctgcaccgtaacggtaacgggcagcactaccgtacccgtcaccggcgtaactgtatcgcctaccaccctgagtctgaccgttggacaaaccgctaccctgaccgctaccgtatcgccagctgatgctaccaacaagaacgtcacctggagcagcagcaataccagcgtagccacggtaagctcaacaggcgtagtcactgccgtagcggccggttcagctaccatcaccgtgaccacagtcgatggggctaaaactgctacctgtgccgtgaccgtaaccgccggaggttccaccaccccctgcagtaatccggtaagcaaaaccctacctctggtacaggatggtgccggcgaattcaggttgagtaatagttttaattaa

SEQ ID NO: 428 - protein, 939 aa, Unknown
  Obtained from environmental sample
  SIGNAL (1)...(30)
  DOMAIN (34)...(469): Glycosyl hydrolase family 9
  DOMAIN (491)...(576): Cellulose binding domain
  DOMAIN (651)...(729): Bacterial Ig-like domain (group 2)
  DOMAIN (738)...(816): Bacterial Ig-like domain (group 2)
  DOMAIN (825)...(903): Bacterial Ig-like domain (group 2)
  SITE (445)...(448): N-glycosylation site. Prosite id = PS00001
  SITE (454)...(457): N-glycosylation site. Prosite id = PS00001
  SITE (505)...(508): N-glycosylation site. Prosite id = PS00001
  SITE (510)...(513): N-glycosylation site. Prosite id = PS00001
  SITE (520)...(523): N-glycosylation site. Prosite id = PS00001
  SITE (540)...(543): N-glycosylation site. Prosite id = PS00001
  SITE (565)...(568): N-glycosylation site. Prosite id = PS00001
  SITE (690)...(693): N-glycosylation site. Prosite id = PS00001
  SITE (695)...(698): N-glycosylation site. Prosite id = PS00001
  SITE (702)...(705): N-glycosylation site. Prosite id = PS00001
  SITE (778)...(781): N-glycosylation site. Prosite id = PS00001
  SITE (783)...(786): N-glycosylation site. Prosite id = PS00001
  SITE (872)...(875): N-glycosylation site. Prosite id = PS00001
  SITE (879)...(882): N-glycosylation site. Prosite id = PS00001
MSCRTLMSRRVGWGLLLWGGLFLRTGSVTGQTYNYAEVLQKSMFFYECQESKIAPGNRVTWRANAAMNDGSDVGKDLTGGWFDAGDHVKFNFPMAFTATALAWGAIDFAQGYISSGQMQYLKRNLRYVNDYFIKCHTAPNELYGQVGNGGLDHAFWGPPEVMRMARPAYKIDASKPGSDLAAETAAAMAAASIVFKSDDPTYSATLLNHAKQLFSFAETYKGKYSDAITDAAGYYNSWSGYNDELVWGAIWLYRATGDATYLSKAESYYDNLGNQGQEPVKAYKWTIAWDDKSYGCYALLAKLTGKEKYKIDAERFLDYWTDGYNGSRITYTPGGLAFLDIWGSLRYAMNTAFVAAYYADAATSAAKTTKYLNFAKQQLHYALGSNPSNRSYVCGFGNNPPVNPHHRGAHGAWSNNVQGPPTETRHILYGALVGGPGSNDSYTDDRSNYTNNEVACDYNALFSGLLAKFVIDYGGTPLANFPVRETPKDEYFVEAKANATGTNFSEWTVWVYNHTAWPAREGSEYKFRLYVNISEGLAAGYTASNYVVQTNNAGVVNFTQLLAADAANGIYYTEVTFKPGTEIYPGGQQYDKKEAQMRISLPNAPASAWDPTNDPSWAGITSTLKQMPGIPMYVDGVKVFGNEPVPGQTVPVTGVTVSPTTLSLTVGQTSTLTATVSPANATNKNVTWSSSNTSVATVSSTGVVTAVAAGSATITVTTVDGAKTATCAVTVTGSTNVPVTGVTVSPTTLSLTVGQTATLTATVSPANATNKNVTWSSSNTSVATVSSTGVVTAVAAGSATITVTTVDGAKTATCTVTVTGSTTVPVTGVTVSPTTLSLTVGQTATLTATVSPADATNKNVTWSSSNTSVATVSSTGVVTAVAAGSATITVTTVDGAKTATCAVTVTAGGSTTPCSNPVSKTLPLVQDGAGEFRLSNSFN

SEQ ID NO: 429 - DNA, 2034 bp, Unknown
  Obtained from environmental sample
atgaggaaaattattttaaagttttgtgcactcatgatggtagtgattttgattgtttccattttacaaatattacctgtatttgcccagagcataccgtatgaaaaggaaaaatatccacatcttcttggcaatcaggtagttaaaaaaccatcggttgccggcagactgcagattattgaaaaggacggaaaaaagtatttagctgaccagaaaggagaaataattcagcttcgtggtatgagtacacatggacttcagtggtatggtgatattataaacaaaaatgcatttgaagctctttcaaaagattgggagtgcaacgttataaggcttgcgatgtatgtgggtgaaggcggctatgcttcaaatccaagtattaaagaaaaagttatagaagggattaagcttgctattgagaatgacatgtatgtaattgttgactggcatgtattaaatcccggtgacccgaacgcagaaatttataaaggggcaaaagactttttcaaagagatagctacaagttttcccaatgactatcacataatatatgaactttgcaatgaaccaaatccaaatgaaccgggagtagaaaatagcttggatggctggaaaaaagtaaaggcttatgcacagcccatcataaaaatgctcagaagtttggggaatcagaacattataattgtaggttcgccaaactggagtcagagacctgactttgcaattcaagaccctataaatgataaaaatgttatgtattcagttcatttttactctggaactcacaaagttgatggatatgtttttgaaaacatgaaaaatgcgtttgaaaatggcgtgccaattttcgtgagtgaatggggaacaagtttggcaagcggtgatggtggaccgtatcttgatgaagcagataagtggcttgaatatttaaattcaaactatattagctgggtgaactggtcgctgtcaaacaaaaatgagacatcagctgcttttgttccatatataaacggtatgcatgatgccacaccacttgaccctggtgatgataaggtgtgggacatagaagagcttagtatttctggagagtatgtgagggcaaggataaaaggaattgcttatcagccaattaagagagataacaaaataaaagaaggagaaaatgcacctttaggcgaaaaagtcttaccatccacgtttgaagatgacactcgtcagggctgggattgggatggaccatctggtgtgaaaggtcctattactatcgaaagtgcgaatggttcaaaagcgctatcttttaattttgagtatccagagaaaaaaccacaagatggctgggcaacagctgcaaggcttatacttaaagacataaatgtagaaaggggaaataataaatatttggcttttgatttttatttgaaaccagatagggcttcaaaaggtatgattcagatatttttagctttttcacctccttccttaggttactgggctcaggtacaagacagttttaatattgaccttgcaaaactgtcaagtgcaaaaaagatagaagacagaatttataagttcaatgtattttttgacttagacaagatacaagataataaagtactgagtccagacacactcttgagagatataatagtagtcatagcagatggcaatagcgattttaaggggaaaatgtatatagataatgttagatttaccaatatcctttttgaggatatcaattttgaaaatagcctttatgatgttatcgacaagctttattctaaaggaatcataaaaggaatttcagtatttaagtacttgccagataaaaccattacaagggctgaatttgctgcactttgtgtcagggcactgaacctgaaaattgaaaaatacgatggtagattttctgatgtgaaaagcggcaactggtattcagatgtagtttatacggcgtataaaaataaattgtttgaaataaaagagaataaattctttcctgaaaatattttaaaaagagaagaagcagtagctttg

SEQ ID NO: 430 - protein, 678 aa, Unknown
  Obtained from environmental sample
  SIGNAL (1)...(29)
  DOMAIN (66)...(330): Cellulase (glycosyl hydrolase family 5)
  DOMAIN (352)...(571): Carbohydrate binding domain (family 17/28)
  DOMAIN (575)...(617): S-layer homology domain
  DOMAIN (635)...(676): S-layer homology domain
  SITE (184)...(193): Glycosyl hydrolases family 5 signature. Prosite id = PS00659
  SITE (236)...(239): N-glycosylation site. Prosite id = PS00001
  SITE (323)...(326): N-glycosylation site. Prosite id = PS00001
  SITE (331)...(334): N-glycosylation site. Prosite id = PS00001
  SITE (432)...(435): N-glycosylation site. Prosite id = PS00001
MRKIILKFCALMMVVILIVSILQILPVFAQSIPYEKEKYPHLLGNQVVKKPSVAGRLQIIEKDGKKYLADQKGEIIQLRGMSTHGLQWYGDIINKNAFEALSKDWECNVIRLAMYVGEGGYASNPSIKEKVIEGIKLAIENDMYVIVDWHVLNPGDPNAEIYKGAKDFFKEIATSFPNDYHIIYELCNEPNPNEPGVENSLDGWKKVKAYAQPIIKMLRSLGNQNIIIVGSPNWSQRPDFAIQDPINDKNVMYSVHFYSGTHKVDGYVFENMKNAFENGVPIFVSEWGTSLASGDGGPYLDEADKWLEYLNSNYISWVNWSLSNKNETSAAFVPYINGMHDATPLDPGDDKVWDIEELSISGEYVRARIKGIAYQPIKRDNKIKEGENAPLGEKVLPSTFEDDTRQGWDWDGPSGVKGPITIESANGSKALSFNFEYPEKKPQDGWATAARLILKDINVERGNNKYLAFDFYLKPDRASKGMIQIFLAFSPPSLGYWAQVQDSFNIDLAKLSSAKKIEDRIYKFNVFFDLDKIQDNKVLSPDTLLRDIIVVIADGNSDFKGKMYIDNVRFTNILFEDINFENSLYDVIDKLYSKGIIKGISVFKYLPDKTITRAEFAALCVRALNLKIEKYDGRFSDVKSGNWYSDVVYTAYKNKLFEIKENKFFPENILKREEAVAL

SEQ ID NO: 431 - DNA, 1836 bp, Unknown
  Obtained from environmental sample
atgaaaggattaattgcggcagcgcttgctggcttggcattcggggcctccctatcctggggacagtgcacaacgtttaccaccagtaccattcagaattgtaatggcattgattacgagctctggagtcagaataacaagggcaccgtaagcatgaagattacgggagggagcacgaatccgaatggaggaactttcgatgctacctggaatggcaccgagaatatcctggctagagctggtaagaaatggggctcgtccagcactaccacccccacgtccgcaggcaatattactcttgaattcgcggcgacatggtcctcaagcgataacgtaaaaatgcttggagtctatggctgggcgtactatccaactggaagtatcccgactaaacaggaaaatggagcaagtacctcattcacaaatcaaattgagtactacatcatccaggatcgtggtagctataatgctgcatcgggtggaacgaactccaaaaaatacggcgaagggacgatcgatggaattctgtatgaattctatatcgcagacagaatcaaccagcctgatctgtcaggaaagagtggaaacttcaagcaatacttcagcgtcccgaaaagtacgagcagccataggcaaagtgggacgattaccgtttccaaacatttccaggcctgggaaaatgccggaatgaaaatgatgtcctgtcgcttgtatgaagtcgcaatgaaagtcgagtcctataccggttctgcgaccggtgttggctctgcgaaggttacaaagaatatactcaccattggtggaatcttgagcagtagcagtactgcaagcagtagcagcacagtaagtagcagtagcagcaatgcatatacgcttgtcacgaatgtttctcccgctggagccggaacagtgaccaggagccccaatactgcgacctatgccccgaatgcttcagtacagcttactgcaacgccgagtaccggttggaaatttgtcggttgggctggggatcttacgtcaactacgagtactgctaccgtcaccatgaccaaagatattaccgcaactgcaaaatttgaactggtatcgggagatggcacgaccaacttgatcaaggatggaaacttccccagtagcagcgtcatctccacaggtgatggcacctcctggaagctcgggcaaggtacaaactggggtaattccgcagcaacgacgagtgtcagcaatggaatcgcgactgtcaatgtgaccaccattggatctcaaacctatcaaccccagctaattcagtataacgtggctctttacaaggatatgagctacaagctcaccttcaaggcaaaagctgctgctgcaaggaaaattgaagtcgcattccaacagtcggtggacccatgggctggatatgcttccaaggaattcgatcttacaacgacagagcagacatatgagttcgtatttaaaatgactagcgctactgacacggcttcacagttcgcgttcaatctcggccaggcaacaggcgccgtcaatattagtgatgtaaagctagtatatacgacagctggtacaacacccgtattccgtggatataatgaggcggcaacacaggagaggcctgtattcatatccttggatggtaggacgttgaacattgttccagtgtatggagccaaactgcaggtcaagttagtggacatcaatggtaagatgagagcctccttcaatgtggtcggaattgcttccatcccgctgtccaatatccccgctgggcggtattatattgacgtaagtggtgacggcgttaagcaggcatccccgatagttctggaataa

SEQ ID NO: 432 - protein, 611 aa, Unknown
  Obtained from environmental sample
  SIGNAL (1)...(21)
  DOMAIN (32)...(261): Glycosyl hydrolases family 11
  DOMAIN (368)...(520): Carbohydrate binding domain
  SITE (72)...(75): N-glycosylation site. Prosite id = PS00001
  SITE (98)...(101): N-glycosylation site. Prosite id = PS00001
  SITE (320)...(323): N-glycosylation site. Prosite id = PS00001
  SITE (421)...(424): N-glycosylation site. Prosite id = PS00001
  SITE (518)...(521): N-glycosylation site. Prosite id = PS00001
MKGLIAAALAGLAFGASLSWGQCTTFTTSTIQNCNGIDYELWSQNNKGTVSMKITGGSTNPNGGTFDATWNGTENILARAGKKWGSSSTTTPTSAGNITLEFAATWSSSDNVKMLGVYGWAYYPTGSIPTKQENGASTSFTNQIEYYIIQDRGSYNAASGGTNSKKYGEGTIDGILYEFYIADRINQPDLSGKSGNFKQYFSVPKSTSSHRQSGTITVSKHFQAWENAGMKMMSCRLYEVAMKVESYTGSATGVGSAKVTKNILTIGGILSSSSTASSSSTVSSSSSNAYTLVTNVSPAGAGTVTRSPNTATYAPNASVQLTATPSTGWKFVGWAGDLTSTTSTATVTMTKDITATAKFELVSGDGTTNLIKDGNFPSSSVISTGDGTSWKLGQGTNWGNSAATTSVSNGIATVNVTTIGSQTYQPQLIQYNVALYKDMSYKLTFKAKAAAARKIEVAFQQSVDPWAGYASKEFDLTTTEQTYEFVFKMTSATDTASQFAFNLGQATGAVNISDVKLVYTTAGTTPVFRGYNEAATQERPVFISLDGRTLNIVPVYGAKLQVKLVDINGKMRASFNVVGIASIPLSNIPAGRYYIDVSGDGVKQASPIVLE

SEQ ID NO: 433 - DNA, 1893 bp, Unknown
  Obtained from environmental sample
atgatccatcaacaaaagcccaaccaagacatcggtaggctattcaagcgcagctgcagctttgtcggtattagcgcggcactggctgttttctcacacaccgcaagtgcagcctgtacttacaacattgataaccaatggggcagcggttttgtcgctagtattactgtaaagaatgacactggtgcaaccgtcaataactggagtgtgaattggcaatatgccaacaatcgcatcaccaatggttggagtgcaaatttctctggcagcaatccttacaccgccaccaatatgagctggaacggtagcattgccgctggccagtcggtgacttttggtttccagggcaacactaacagcaataccgttgagcgcccggtggttaacggttcactgtgcggtactgcaacaacctcttcagttcgctccagcgtggctgcgacgtcttccagtcgctccagtgttgcgcccagctcgattcctgcttccagcactccgcgttcaagcacacctgccacctcttcttctgcttccagcttctcagtaccggccaataattttgcgcagaatggcggcgtggaatctggtttgaccaactggggtacgactgcgggcaccgtgactcgctctactgccgataaacacagcggtacagccagtgccttaattaccggccgcactgctgcctggaatggtttgacgtttaatgtgggcgcattgaccaacggcaaccagtaccaagtcaacgtgtgggtgaaattggctccaggtacgcccgacagcgtactgaccttaaccggtaagcgtgtagacgatagcgatactactacctacaacgaatacacacgcgtagcgactgtgactgcctctgccaatgagtggcgtttgctggaaggttactacacccaatctggcagcactgcattccagcatttcattatcgaagcaacggatactactgccagttattacgcggatgatttcgccatcggcggtcaagtcgtacaagttccaagcagcagctcacgcagctcaagcagtgctccggcggctagaaaattcatcggcaacatcaccacctcgggtgcagtgagatccgactttactcgttactggaaccaaattacaccagagaacgaaggtaagtggggttccgttgaaggtactcgcaaccagtacaactgggcaccgctggatcgtatttatgcttacgctcgccaaaataatattccggtaaaagctcacacgtttgtgtggggtgcgcaatcacccgcgtggctcaataacttaagcggaccggaagtcgctgttgaaattgaacaatggattcgcgattactgtactcgttaccctgacacggcgatgattgacgtagtgaacgaagcggttcctggccatcaaccggcaggttatgcacaacgagcatttggcaataactggatccaacgcgtgttccaattggctcgccaatattgccctaactcgatcctgatcctgaatgattacaacaatatccgttggcagcacaatgagtttattgcccttgcaaaagctcaaggcaattatattgatgcagtcggcctgcaggcgcatgaactgaagggtatgacagcggcgcaagtcaaaaccgcaatcgacaatatttggaaccaagtgggcaagcccatctacatttctgaatacgacattggcgataacaatgaccaggttcaattgcagaatttccaggcgcatttccctgtattctgggaccatccgcatgttaaaggcatcaccatttggggttatgtcaatggcagaacttggattgaaggctcgggcctgatttctgacaacggaacaccgcgccccgcaatgacttggttgctgaataactatatcaataagcagtaa

SEQ ID NO: 434 - protein, 630 aa, Unknown
  Obtained from environmental sample
  DOMAIN (37)...(133): Cellulose binding domain
  DOMAIN (185)...(333): Carbohydrate binding domain
  DOMAIN (345)...(626): Glycosyl hydrolase family 10
  SITE (59)...(62): N-glycosylation site. Prosite id = PS00001
  SITE (68)...(71): N-glycosylation site. Prosite id = PS00001
  SITE (87)...(90): N-glycosylation site. Prosite id = PS00001
  SITE (98)...(101): N-glycosylation site. Prosite id = PS00001
  SITE (101)...(114): Cellulose-binding domain, bacterial type. Prosite id = PS00561
  SITE (102)...(105): N-glycosylation site. Prosite id = PS00001
  SITE (362)...(365): N-glycosylation site. Prosite id = PS00001
  SITE (435)...(438): N-glycosylation site. Prosite id = PS00001
  SITE (561)...(571): Glycosyl hydrolases family 10 active site. Prosite id = PS00591
MIHQQKPNQDIGRLFKRSCSFVGISAALAVFSHTASAACTYNIDNQWGSGFVASITVKNDTGATVNNWSVNWQYANNRITNGWSANFSGSNPYTATNMSWNGSIAAGQSVTFGFQGNTNSNTVERPVVNGSLCGTATTSSVRSSVAATSSSRSSVAPSSIPASSTPRSSTPATSSSASSFSVPANNFAQNGGVESGLTNWGTTAGTVTRSTADKHSGTASALITGRTAAWNGLTFNVGALTNGNQYQVNVWVKLAPGTPDSVLTLTGKRVDDSDTTTYNEYTRVATVTASANEWRLLEGYYTQSGSTAFQHFIIEATDTTASYYADDFAIGGQVVQVPSSSSRSSSSAPAARKFIGNITTSGAVRSDFTRYWNQITPENEGKWGSVEGTRNQYNWAPLDRIYAYARQNNIPVKAHTFVWGAQSPAWLNNLSGPEVAVEIEQWIRDYCTRYPDTAMIDVVNEAVPGHQPAGYAQRAFGNNWIQRVFQLARQYCPNSILILNDYNNIRWQHNEFIALAKAQGNYIDAVGLQAHELKGMTAAQVKTAIDNIWNQVGKPIYISEYDIGDNNDQVQLQNFQAHFPVFWDHPHVKGITIWGYVNGRTWIEGSGLISDNGTPRPAMTWLLNNYINKQ

SEQ ID NO: 435 - DNA, 2994 bp, Unknown
  Obtained from environmental sample
atgcttcagaaaggttcaagcggaacagtaatgagtggaaaaggtgaaatctcccgcgtaaaatctgaagcggcaggaatcatggtaaacggcaaagagctggagcaagggaaggagtacagttggccgtctgagagggaagcgttgatacctgctgacgagaagggcgttccggcagggaacacgggaaaagaaactggcgggctgactccatctccggggaatagcagccctggcacgggcagtaattcgggatcccgtccgcctgactcctggtcacctgtggttgcgcagggaagcttacctggtacaacaaaggtaactgccacagtctctgcagggaaccggctggctgtcctggtatccaacaaagagatttcctctatgcaggccggggaagcattgcataagagcaatttattgatagatccctatgaatcaggaaccgatatctccggggttgactcaagcattaacaagtaccttggagtttatgaagttgatcagaacggaaagattgtccgtttccggcagatggtcttgacggaagcaaatattaagcctgaagcatggaatatggtttggaatgatgaattcgcaggaacccaaatcgacaccagcaaatggaaccatgtgcgaggcggtggcggttacgggaataatgagcttcaaaactatactgatcgcgcaaagaacgctcgcattgagaacgggcatttagttattgaagcccataaggaagattatcaaggcaatgcatacacttccgcgaagctgacgactgagggcaagggagattggacttacggcaaatttgagattcgtgcccaaatgccgcaaggcaaaggaatatggccggcgatctggatgatgcctacggatcagaatttgtattccggttggccggctagcggagaaatcgatatcatggagcttctgggccatgagccgaataaaatatatggcactcttcactatggactgcctcatgagcaatcgcagggcagctacactctgcctgaaggtgccacgtttgccgacgattttcatacctttgcggtagaatgggagcccggagagttccgtttttacgtggacggggtgttgtattccaagcagaacaactggttcagccaaaatcagcaggaaggtggagaatacacctatcccgcaccctttgacagggacttcttcctgcagttgaatctggctgttggcggcgattggccagggaatccggactccactacggaatttccgcaaaagatgctcgtagactatgtccgtgtctatgaaagggatggtcaggcttatcgccagccagttatgcctgcagccaagaacgtcgtcataagagagccgggagaagatgggaattatgtggagaacggaacgtttgaagatgaattgaaccattgggtgtttcaaccgttcgccccacctgctgatctgttcggcggtagaggatctgtggcggtggatcaaggagcagtgaaaacaaccatagatcaggaaggggacgtcaattacgccatccagctgattcaagccggcttgccattgattaaaggatcgacctaccagctgtcctttgatgcatggtcgtcaggagacagaacgatgatagcgtcattgtcgggccctgaccggagctacacccgctatatggatgacaaaacggttgcgcttaccgcggaacggcaaaactacacctatacttttaccatgaattcggatacggaccctaatgccagactagagttcaatatgggggacgcaggcaccctgccggtatggattgatgaggtgcgtcttgttaaaactgctgatcccgatccaaatatgcctcgtagtgctttaccgagcggaaacttgatttataacggcacttttgatcaaggcaaggatcgcctcggcttttggaagatcgatggaccgggcagcgcggatgcgaattattatgtcggaagcgcgataactgaccgcaagctgtacgtaaagccaagaactgctggacagcctgatgcgcttgttcttcgtcaggatcggttaaacctcatagaaggaaagatgtacattctgtcatttagcgctagagcggaaaataacgtatccatttcggcacggataggcaatgaagataagccgagtctttatggagagcaagtgtttgccataggaacagaaccgcaaacttattcatggatttttacaatgggcccggtgcacagctcaagccagcttgaattcgggttgggggctttgacgcatcgccttgagctggataatgtgagcttgaaggaaatgagtccgcctgtggtggtcaacggttcgaagcggattgaagcggagaattattctgatatgaaaggcgtacaaaagggagaagacggattaagcgttggctggatcgatccgggcgactggatgcagtacatcatcgatgtcaagaaggctggcgaatacaagattgcttactacgttgcgtcgggatatgaagggggcggatcattgaccttgctggccaagcagggcagcgtatatacgcatacattgcccgtaggcgagatccaggagacggatgcggatttcaaatatacgtggaacgtagcgaatacgggcgattggggaatcttcaaactgatggagcagaccattcagctgaatgaaggaatccagaccttgcaaatctatgctcctcatgtgaatattgactattttacgctgacggatgtcaatcagcggagttccaccggaaatctaattcgcaatgggacctttgatgccgatgtcagtgagtggcagacctatcagtcggacaataagtccgataagctctctattatggcgaaggatggtgtcatgcaaattcaacttcctgaaataatgcccgaaaattggaaccagcaggtctatcaggagggcctcacgttggagcaggggagaatctactcggtaacctttgatgtctattccacggtagatcggccaatt

SEQ ID NO: 436 - protein, 998 aa, Unknown
  Obtained from environmental sample
  DOMAIN (220)...(429): Glycosyl hydrolases family 16
  DOMAIN (458)...(608): Carbohydrate binding domain
  DOMAIN (623)...(769): Carbohydrate binding domain
  DOMAIN (782)...(911): Carbohydrate binding module (family 6)
  SITE (228)...(231): N-glycosylation site. Prosite id = PS00001
  SITE (470)...(473): N-glycosylation site. Prosite id = PS00001
  SITE (577)...(580): N-glycosylation site. Prosite id = PS00001
  SITE (637)...(640): N-glycosylation site. Prosite id = PS00001
  SITE (713)...(716): N-glycosylation site. Prosite id = PS00001
  SITE (774)...(777): N-glycosylation site. Prosite id = PS00001
  SITE (787)...(790): N-glycosylation site. Prosite id = PS00001
  SITE (797)...(800): N-glycosylation site. Prosite id = PS00001
  SITE (938)...(941): N-glycosylation site. Prosite id = PS00001
  SITE (955)...(958): N-glycosylation site. Prosite id = PS00001
MLQKGSSGTVMSGKGEISRVKSEAAGIMVNGKELEQGKEYSWPSEREALIPADEKGVPAGNTGKETGGLTPSPGNSSPGTGSNSGSRPPDSWSPVVAQGSLPGTTKVTATVSAGNRLAVLVSNKEISSMQAGEALHKSNLLIDPYESGTDISGVDSSINKYLGVYEVDQNGKIVRFRQMVLTEANIKPEAWNMVWNDEFAGTQIDTSKWNHVRGGGGYGNNELQNYTDRAKNARIENGHLVIEAHKEDYQGNAYTSAKLTTEGKGDWTYGKFEIRAQMPQGKGIWPAIWMMPTDQNLYSGWPASGEIDIMELLGHEPNKIYGTLHYGLPHEQSQGSYTLPEGATFADDFHTFAVEWEPGEFRFYVDGVLYSKQNNWFSQNQQEGGEYTYPAPFDRDFFLQLNLAVGGDWPGNPDSTTEFPQKMLVDYVRVYERDGQAYRQPVMPAAKNVVIREPGEDGNYVENGTFEDELNHWVFQPFAPPADLFGGRGSVAVDQGAVKTTIDQEGDVNYAIQLIQAGLPLIKGSTYQLSFDAWSSGDRTMIASLSGPDRSYTRYMDDKTVALTAERQNYTYTFTMNSDTDPNARLEFNMGDAGTLPVWIDEVRLVKTADPDPNMPRSALPSGNLIYNGTFDQGKDRLGFWKIDGPGSADANYYVGSAITDRKLYVKPRTAGQPDALVLRQDRLNLIEGKMYILSFSARAENNVSISARIGNEDKPSLYGEQVFAIGTEPQTYSWIFTMGPVHSSSQLEFGLGALTHRLELDNVSLKEMSPPVVVNGSKRIEAENYSDMKGVQKGEDGLSVGWIDPGDWMQYIIDVKKAGEYKIAYYVASGYEGGGSLTLLAKQGSVYTHTLPVGEIQETDADFKYTWNVANTGDWGIFKLMEQTIQLNEGIQTLQIYAPHVNIDYFTLTDVNQRSSTGNLIRNGTFDADVSEWQTYQSDNKSDKLSIMAKDGVMQIQLPEIMPENWNQQVYQEGLTLEQGRIYSVTFDVYSTVDRPI

SEQ ID NO: 437 - DNA, 1353 bp, Unknown
  Obtained from environmental sample
atggccgtggagcatgactgtttcataccaaacgatcggaccggctattatgtcatagtcggggtatgggatatttttgatactgtaaatgctttttatcaagtcattgacgtgaatttgacgatcgacccttcgcaaccgactacgccggctccaggacatcctggtgatccgaatcgtttcggggatatccgcgactggagcccgatccgtccttacaatccaggtgagcaagtcgttcacaaaggttctatttggcaagcaagatggtggacgcaaggacaggagcccggattgcacgaagtctggcagcagatcggcccggccacgggcaacccgacagttcctgcggcaccggcgggcctgacggcgacggcgggcaatgctcaggtatccttgagctggaacgcggtgagcggtgcaacgagctatacggtgaagcgggcgacaacaagcggcggtccgtatatggacgtggcgacgggcctgacgacaccgagctacacgaacaccggcttgacgaacggtacgacgtactattacgtcgtcagcgcgtcgaacagcgcgggtcagagcccgaactccgcgcaagcgagcgcgacgccggcggccggcacggaagttcctgcggcaccggctggcttgacggcgacagccggcaatgcgcaggtatccttgagctggaacgcggtgagcggcgcgacgagctatacggtgaagcgggcggtaacaagcggcggtccgtacatggacgtggcgacgggcctgacgacaccgagctacacgaacaccggcttgacgaacgacacgacgtattattacgtcgtcagcgcgtcgaacagcgcgggtcagagcccggactccgcgccagtgagcgcaacgccggcgggtgatcctatcgcctcgaacctcgtgttgcagtataaagcaggcgatacgaatgcaaccgacaaccagatcaagcctcacttcaacatcaaaaataatggcacttcggctgtcgatctaagcacgcttaaaatccgctactatttcaccaaagaaggttctgcggcgatgaacggctcaatcgactgggcacagctcggtgcgagcaacattcagatttcgttcggcaaccataccggtacggattcggatacgtacgtggagctgggcttctcgtccggcgcaggctcgattgcggcagacggccaatccggcgaaatccagctgcgcctgtccaaggcggactggtcgaatttcaacgaggcgaacgactactcgttcgatgggacgaagacagcgttcgcggactggagccgggtcgttctgtatcagaatggtacggctgtatgggggaatgagccctaa

SEQ ID NO: 438 - protein, 450 aa, Unknown
  Obtained from environmental sample
  DOMAIN (64)...(103): Carbohydrate binding domain
  DOMAIN (64)...(103): Carbohydrate binding domain
  DOMAIN (116)...(195): Fibronectin type III domain
  DOMAIN (116)...(195): Fibronectin type III domain
  DOMAIN (209)...(288): Fibronectin type III domain
  DOMAIN (209)...(288): Fibronectin type III domain
  DOMAIN (306)...(386): Cellulose binding domain
  DOMAIN (306)...(386): Cellulose binding domain
  SITE (39)...(42): N-glycosylation site. Prosite id = PS00001
  SITE (177)...(180): N-glycosylation site. Prosite id = PS00001
  SITE (272)...(275): N-glycosylation site. Prosite id = PS00001
  SITE (318)...(321): N-glycosylation site. Prosite id = PS00001
  SITE (334)...(337): N-glycosylation site. Prosite id = PS00001
  SITE (359)...(362): N-glycosylation site. Prosite id = PS00001
  SITE (378)...(381): N-glycosylation site. Prosite id = PS00001
  SITE (447)...(450): N-glycosylation site. Prosite id = PS00001
MAVEHDCFIPNDRTGYYVIVGVWDIFDTVNAFYQVIDVNLTIDPSQPTTPAPGHPGDPNRFGDIRDWSPIRPYNPGEQVVHKGSIWQARWWTQGQEPGLHEVWQQIGPATGNPTVPAAPAGLTATAGNAQVSLSWNAVSGATSYTVKRATTSGGPYMDVATGLTTPSYTNTGLTNGTTYYYVVSASNSAGQSPNSAQASATPAAGTEVPAAPAGLTATAGNAQVSLSWNAVSGATSYTVKRAVTSGGPYMDVATGLTTPSYTNTGLTNDTTYYYVVSASNSAGQSPDSAPVSATPAGDPIASNLVLQYKAGDTNATDNQIKPHFNIKNNGTSAVDLSTLKIRYYFTKEGSAAMNGSIDWAQLGASNIQISFGNHTGTDSDTYVELGFSSGAGSIAADGQSGEIQLRLSKADWSNFNEANDYSFDGTKTAFADWSRVVLYQNGTAVWGNEP

SEQ ID NO: 439 - DNA, 2217 bp, Unknown
  Obtained from environmental sample
atggtggagcacgaagctgagcttcatgattaccgcgaacgaatatgcgaagttgcttggcaattcgctgggcctggagggcgagaaggcaaagcggattttgcgggaaatcaacaactggctgttttgaagatgaaattatcgagagggagggggcatggcgttttgaaacgagcaggtctgattgggcttattgcagcgatattgggctgcgcggcgctgcttatgcacaatgagatctcatccctgggaattcagctgagatcatggctcagagggagcgacaatgtgaacgctagctgggaaaaggattggaagacggctgctaacgagcaaatcgagcagctccgcaagcgcaatgtggagatcgaggtcgtcgatctgaacggaaacccgctgcctggggctaccgttcgcgcggttcagcgcacgcatcagtttggcttcggcaccgccatcaaccgaacggcgttgagcaatccggtgtacgccgattttgtcaaaaaccgtttcgaatgggtgaccttcgagaacgaggccaagtggctctggaatgaggccgtacaagggcgggtctattatcgggaggccgatcagctgctcgaatttgccaggcaaaacgggctgaaggtgcgcggacataatctgttctgggaggcggagaaatatcagccgcagtgggtgaagagtctgacgggcgctgcgctgaaggaagcgatcgataaccggctgaacagcgccgtcctgcattttaagggcaattttctgcactgggacgtcaacaacgaaatgtttcacggcagcttcttcaaggatcgcctgggggaagaaatctggacctatatgtataagcgaacccgggaactcgatcccggcgtcaagctgttcgtcaacgattacaattttatcgagtacccgccggagcgggattataaccaggtcattcaagcgctcatcgatcgggggatgccgattgacggcatcggcgcgcaagggcattttaacggagtcatcgatcccttgttcgttaagggaagactggataagctggctgagctgaatctgccgatctggattaccgaattcgattccacgcataaggacgagagagtccgtgccgataatctggagaagatgtatcggctggcgttcgcccatccggcggtcgaagggattgtcatgtggggcttctgggcgggctcccattggaagggcactgacggcgcgatcgtgaatcaagactggacgctcaatgccgccggacagcgataccagcagcttatggatgaatggacgacggtcgtcgaaggcacgaccgatcagcgcggcatgttttcgttccgggggttccacggaacctacgatatgctggtcgattaccctggagcggcggctgtgaagcagtcctttaccttggagcccggctctggcaatgcgaagctgcacattccgttcgacgttcaggacaagtccatcccggaggctcctgccaagctcagcgccgctgccgcggattcccaggttatgctgagctggagcaaggtcaacggggcaaccggctatacggttaaaagcgcggtcagcgccgacggtccctatacgccgattgcccatcagctgctcaccgagaccttcacgcacatcggtctagtgaaccggaaagattattattacgtggtgagcgccagcaaccatctaggtgagagcccggattccgccccgatccgggccactccgcgtgccgcgggcgagttacaaacgaatctcgtgcttcagtaccgctccgctgatggagataacaactatcaaatgaagcctcagttcacgatcaagaacgcaggcaaagtgcccatcccgttaagcgagctgacgatccgctactatttcacgccggagagcacgcagccggtggataccaggatcgactgggcccaattcggagcagagcatgtccagacgacggtcgttccgccatccgatgccgcggcgcacgcctatgtcgagctcagcttcctggagtcggcaggggccatcccttccgatacgacattaggcaatattcagctgcgcatctttaacagcgatggctcttcgttcgataaaacgaacgattattccttcgacccgacgaaaaaggcttatacggcgtgggagaaggtcacgctttatcggaacggggaactggtttgggggatagagccttggggcgcgaagtaa

SEQ ID NO: 440 - protein, 738 aa, Unknown
  Obtained from environmental sample
  DOMAIN (137)...(428): Glycosyl hydrolase family 10
  DOMAIN (591)...(670): Cellulose binding domain
  SITE (99)...(102): N-glycosylation site. Prosite id = PS00001
  SITE (156)...(159): N-glycosylation site. Prosite id = PS00001
MVEHEAELHDYRERICEVAWQFAGPGGREGKADFAGNQQLAVLKMKLSRGRGHGVLKRAGLIGLIAAILGCAALLMHNEISSLGIQLRSWLRGSDNVNASWEKDWKTAANEQIEQLRKRNVEIEVVDLNGNPLPGATVRAVQRTHQFGFGTAINRTALSNPVYADFVKNRFEWVTFENEAKWLWNEAVQGRVYYREADQLLEFARQNGLKVRGHNLFWEAEKYQPQWVKSLTGAALKEAIDNRLNSAVLHFKGNFLHWDVNNEMFHGSFFKDRLGEEIWTYMYKRTRELDPGVKLFVNDYNFIEYPPERDYNQVIQALIDRGMPIDGIGAQGHFNGVIDPLFVKGRLDKLAELNLPIWITEFDSTHKDERVRADNLEKMYRLAFAHPAVEGIVMWGFWAGSHWKGTDGAIVNQDWTLNAAGQRYQQLMDEWTTVVEGTTDQRGMFSFRGFHGTYDMLVDYPGAAAVKQSFTLEPGSGNAKLHIPFDVQDKSIPEAPAKLSAAAADSQVMLSWSKVNGATGYTVKSAVSADGPYTPIAHQLLTETFTHIGLVNRKDYYYVVSASNHLGESPDSAPIRATPRAAGELQTNLVLQYRSADGDNNYQMKPQFTIKNAGKVPIPLSELTIRYYFTPESTQPVDTRIDWAQFGAEHVQTTVVPPSDAAAHAYVELSFLESAGAIPSDTTLGNIQLRIFNSDGSSFDKTNDYSFDPTKKAYTAWEKVTLYRNGELVWGIEPWGAK

SEQ ID NO: 441 - DNA, 5040 bp, Unknown
  Obtained from environmental sample
atggcaagaagtaagcgagtattagcatggattatgtctagtgtgcttctgatatccatggcgatgccatccttcgcatcaggtgattcaagccaagtgccaagggttatatttgaaacaggttttgaaacgggattagatggcttcaaaggacggggtagtgccaccttaactcgaacgactgatgaaacgcaagcaggcgactattcggttcttgtgagcaatcggcttgagcactggaatggggcatcattgccacttacaggcttcgttctaccaggtaatacatatgaatttgttggttacataaaagcaaaagcagatgtagcagacaattatgtcatgagtggtgagtacaatgaggggatttctggaaatcaatatccatggatatctaatcgtttgttaacggttcaagatggctttgttgagtttagaggtgaactaaccatactagaggatatgacgtcctttaatctaaactttgaacatcaaaatgctgaagtggaattttatttagattctgttcaggttattctaatcgaagaaggtcaagtcaatgacttaccaatgaatgtaagaagagcgccacttacacttgctgaaactcccttacatgagatttgggcagatcactttactattggcaatatttatacgccaggttttcgcacagatatacgtggtgaggtattagcccatcattttaatgtgatcacagctgaaaatattatgaagccagatcatttgcaaagggaacaaggtatttttacttttagtgcttccaacgatatgatggaatttgccagagcaaataatcaagaagtcattggacatactttggtgtggcattctcaatccttcccatggtttgaagctttaaatccaacacgtgatgaagctatagccattatgcatgcccatattgaaactgttatgggacattttaatgaaaactacccaggtgtcattacaggatgggatgttttgaatgaagccattcaaccaagacagggtcaagatcctgaaaattggcgcttgcatttaagggataccaaatggttacgtgccattggtgatgattatattgccatcgcttttaacaaagcccatgaaatggatccagatgctattctttattataatgattataatgataatgactattttaaagcaaccattataaaagccatggtgcaggagttgcgtaatgaaggcgtgcccattcatcgtattgggatgcaaggtcattataatttacagacaccattaaactctattagaaccagcgttgagcgttttagtgaaattactggtcatgaagatctaccacctattggcattagtttcacagaaattgatgtaacggtaccagggtttgaaagtgcagcccgtttacctgaagaggtagaaattcgccaagctcagttttatgctcaattaatgcagattttaagagacaacagcgatgtgattcatcgtgttactttctggggtatgtctgatcgtgaatcatggcgtgcagatcgtcatcctaacatgttagatcctcagtatggtccaaagcatgtctttcatgctatagccaatccagaggctttccttacggcctacccattaccagagacgccagatgctcaaacagcctatgcatctcaaggtcaaccagttgtggggcagtttaatttggatgcgtatcaaaattcagaagtaataccagtggctaatcaaatgacagcccataatggcgcaacagcggttgcaagggtggtttggcacgaagatgctatttatattttagccaatgtcagcgatgccacaccgaatgtagcagcttcggctgcccatgagcaagactcacttgaggtatttatttcaaatacggattcaagaatttctaattatatgccaggtgactatcaactgagatttaatcgtgccggcgtgcatacatatggttcgactggttcgattgaaggtatgacctttgcggtacaagatggtccaataggttatcaagttgaagtgcgtattcccttagaaaatgaagtctatgttggcagaagacttggttttgacttacaagtcaatgatgcatgggaagttggcggtacttctggccgacaagcatttgctaaatggaatgatcacactgacaatggctggcagtctacagagttttggggctggttattattacaaggcgatgcggcacctgtcttacccgttgtattagtggaagaaggctttgaaacggatttaggttcattccaaccaaggggtagtagtacactgactcgaacccaagaggttagtcatgaaggcgactattccgtattggttagcaaccgtgtcaacaactggaacggtgcgtcattaccgttaacaggcattgttcaaccaggcaacacttatgagtttgttggttacattagagcaaaagcagatgtaactggatcatatatcatgagtggtgagtttaataatggatctggtgtattagaaaacggtagtattaatcgatggccatggctatcaaaccgttcattaacgatagcagatggttttgttgagtttaagtcagaactaaccatacctagtgacatgacgacgtttaacttgaactttgaacaccaaaatgctgaagtagaattttacttagatgctgttcaagtcactttgattgcagaagctgatgtaacaccagtggacccaccagtagacccaccagtagagccagaaattacagtggtctattcaatggtagatgatgcagccattcaagggattgaagtgggaacaacaggcactgctgaagatttttcggatattagtgaagctttattagtatctggttcaccagttgttactgctgtagcacatccagaagaagcaggaaagatcggtatagagcttagtaatcgagcagagaattggcatgcgctagactttatgttcccagccataggtgtgcagcggggtgggagctatcgatttgtggccagtggccgtatggcagaaggaacaggtaattcaaatcgtagaatgcagtggaatcaaacggatgcgccatggagtgaaatatcaggttctagaaccaatgtggcacctgcagcaaccacatggaccattgacgtgactttaagtcgattacagatcaacacattattaaacgctggtcaaagaggtcttcgaattcaaacgggtaatgcaccaactgtgaccattaccattgacgatgtgtttgtttatcagattggtgacattgacacagcaggtttaccattaccaccacaatggaattttgatttgccaagattatcagaattattcgagccatattttggtcttggtaacatttattcaaccgaaacattaatgaacgctaatgaaacaaaaagagcatttttacatcactttaacgtgattacagcagaaaatggtcataaaccatccagtattgcagggccagaaaatagctttacagtaccagaacctgagcaattcaactttacggatgcagaccgaattgtaaactttgctgttgaaaatgacattgaattagtaggacatgcacttgtatggcattcacaaagtccaaactggctgtttagaagtgcggctaacacaccgctaacaagagcagaagccaaagagcgcatggcatattacatgaaaactgtttcagagcatttcgaagcacaaggtacattaggcgcattttatggttgggatgttgtgaatgaagccatcgccagtggtggtggtacattcgtagatcaaccaggtcattggcgcacgcaaatgcgaacatcatcaccatggttccaagcatttaacaatggattagatgtagaagccggtgaacatgccagtgattatattttctatgcatactattatgcaagaaagtatttcccaacatcgatcctatactacaacgattacaacgatgaaataccaaacaagcgagacaatatcgctcaaatggtagaagagataaatgcactttgggaagcacatgaagaatatgatggtcgcttactgattgaatccatcggtatgcaaagtcattatcacatggaaggttggacaaccagcgtagacaatgtaagagctgctttagatcgatacattgcaacaggtgcaagagtcagtgtgactgagttagatatcacttatggtggtcatggtagtaatgcatatgcatcacttacaccagaacaattagcggcacaagcggagcgatatgcagagatatttacattgtatttagagcgtgcagatcagttaagccgtgtatccatctggggtatgtctgatgctaacagctggagaagttctggattcccattactatttgacagttcacttaatgctaaaccagcatttaatgccattgtagaattagttaaaaactgggagacaccaacagttgtagcaccagtgattcaaacaagaacactagcaccattagaaagtggtgaaagagtctttaccatgttagatgtggtaagaggatctaatgcacctgtatggtttagcataacagacggtgcattaccagaaggtataatccttcattctagaacaggtattttagaaggaacaccagttgaagatggtcactatagctttactgtaactgctagaaattacggcggttcaacaagtcaagcgctgactttaacagtaggtcatccagtagcaccaccagtaacgccaccagtaacgccaccaaccgtaatcattgatgaatcggatataccacaggctggtccaggccttagggcaccacagattgttgtaaccgttcaagaaggcagtgaagtaacgtttgatcttgaaaaattagaagaagttatggcatcactttcaagtcaagtgccattggtgttagatgttgaattggaagattctatcatcaccttggatcaaacattacttaaacgattaacagacaaggcggctggaatcgaaatacaagcagatggatttagttatatgcttccagcagaggtattagaggcaattctttgg

SEQ ID NO: 442 - protein, 1680 aa, Unknown
  Obtained from environmental sample
  SIGNAL (1)...(26)
  DOMAIN (34)...(181): Carbohydrate binding domain
  DOMAIN (204)...(532): Glycosyl hydrolase family 10
  DOMAIN (553)...(736): Domain of unknown function (DUF1083)
  DOMAIN (742)...(895): Carbohydrate binding domain
  DOMAIN (1106)...(1471): Glycosyl hydrolase family 10
  DOMAIN (1513)...(1555): Putative Ig domain
  SITE (611)...(614): N-glycosylation site. Prosite id = PS00001
  SITE (841)...(844): N-glycosylation site. Prosite id = PS00001
  SITE (848)...(851): N-glycosylation site. Prosite id = PS00001
  SITE (860)...(863): N-glycosylation site. Prosite id = PS00001
  SITE (1034)...(1037): N-glycosylation site. Prosite id = PS00001
  SITE (1147)...(1150): N-glycosylation site. Prosite id = PS00001
  SITE (1403)...(1413): Glycosyl hydrolases family 10 active site. Prosite id = PS00591
MARSKRVLAWIMSSVLLISMAMPSFASGDSSQVPRVIFETGFETGLDGFKGRGSATLTRTTDETQAGDYSVLVSNRLEHWNGASLPLTGFVLPGNTYEFVGYIKAKADVADNYVMSGEYNEGISGNQYPWISNRLLTVQDGFVEFRGELTILEDMTSFNLNFEHQNAEVEFYLDSVQVILIEEGQVNDLPMNVRRAPLTLAETPLHEIWADHFTIGNIYTPGFRTDIRGEVLAHHFNVITAENIMKPDHLQREQGIFTFSASNDMMEFARANNQEVIGHTLVWHSQSFPWFEALNPTRDEAIAIMHAHIETVMGHFNENYPGVITGWDVLNEAIQPRQGQDPENWRLHLRDTKWLRAIGDDYIAIAFNKAHEMDPDAILYYNDYNDNDYFKATIIKAMVQELRNEGVPIHRIGMQGHYNLQTPLNSIRTSVERFSEITGHEDLPPIGISFTEIDVTVPGFESAARLPEEVEIRQAQFYAQLMQILRDNSDVIHRVTFWGMSDRESWRADRHPNMLDPQYGPKHVFHAIANPEAFLTAYPLPETPDAQTAYASQGQPVVGQFNLDAYQNSEVIPVANQMTAHNGATAVARVVWHEDAIYILANVSDATPNVAASAAHEQDSLEVFISNTDSRISNYMPGDYQLRFNRAGVHTYGSTGSIEGMTFAVQDGPIGYQVEVRIPLENEVYVGRRLGFDLQVNDAWEVGGTSGRQAFAKWNDHTDNGWQSTEFWGWLLLQGDAAPVLPVVLVEEGFETDLGSFQPRGSSTLTRTQEVSHEGDYSVLVSNRVNNWNGASLPLTGIVQPGNTYEFVGYIRAKADVTGSYIMSGEFNNGSGVLENGSINRWPWLSNRSLTIADGFVEFKSELTIPSDMTTFNLNFEHQNAEVEFYLDAVQVTLIAEADVTPVDPPVDPPVEPEITVVYSMVDDAAIQGIEVGTTGTAEDFSDISEALLVSGSPVVTAVAHPEEAGKIGIELSNRAENWHALDFMFPAIGVQRGGSYRFVASGRMAEGTGNSNRRMQWNQTDAPWSEISGSRTNVAPAATTWTIDVTLSRLQINTLLNAGQRGLRIQTGNAPTVTITIDDVFVYQIGDIDTAGLPLPPQWNFDLPRLSELFEPYFGLGNIYSTETLMNANETKRAFLHHFNVITAENGHKPSSIAGPENSFTVPEPEQFNFTDADRIVNFAVENDIELVGHALVWHSQSPNWLFRSAANTPLTRAEAKERMAYYMKTVSEHFEAQGTLGAFYGWDVVNEAIASGGGTFVDQPGHWRTQMRTSSPWFQAFNNGLDVEAGEHASDYIFYAYYYARKYFPTSILYYNDYNDEIPNKRDNIAQMVEEINALWEAHEEYDGRLLIESIGMQSHYHMEGWTTSVDNVRAALDRYIATGARVSVTELDITYGGHGSNAYASLTPEQLAAQAERYAEIFTLYLERADQLSRVSIWGMSDANSWRSSGFPLLFDSSLNAKPAFNAIVELVKNWETPTVVAPVIQTRTLAPLESGERVFTMLDVVRGSNAPVWFSITDGALPEGIILHSRTGILEGTPVEDGHYSFTVTARNYGGSTSQALTLTVGHPVAPPVTPPVTPPTVIIDESDIPQAGPGLRAPQIVVTVQEGSEVTFDLEKLEEVMASLSSQVPLVLDVELEDSIITLDQTLLKRLTDKAAGIEIQADGFSYMLPAEVLEAILW

SEQ ID NO: 443 - DNA, 2823 bp, Unknown
  Bacterial DNA
gtggccggagaatggactgagatttcggcaaaatacaaagcacccaaaactgcagtgaatattactttgtcaattacaaccgacagcactgtagatttcatttttgacgatgtaaccataacccgtaaaggaatggctgaggcaaacacagtatatgcagcaaacgctgtgctgaaagatatgtatgcaaactatttcagagttggttcggtacttaactccggaacggtaaacaattcatcaataaaggccttgattttaagagagtttaacagtattacctgtgaaaatgaaatgaagcctgatgccacactggttcaatcaggatcaaccaatacaaatatcagggtttctcttaatcgtgcagcaagtattttaaacttctgtgcacaaaataatatagccgtcagaggtcatacactggtttggcacagccagacacctcaatggtttttcaaagacaatttccaggacaacggaaactgggtttcccaatcagttatggaccagcgtttggaaagctacataaaaaatatgtttgctgaaatccaaagacagtatccgtctttgaatctttatgcctatgacgttgtaaatgaggcagtaagtgatgatgcaaacaggaccagatattatggcggggcgagggaacctggatacggaaatggtagatctccatgggttcagatctacggagacaacaaatttattgagaaagcatttacatatgcaagaaaatatgctccggcaaattgtaagctttactacaacgattacaacgaatattgggatcataagagagactgtattgcctcaatttgtgcaaacttgtacaacaagggcttgcttgacggtgtgggaatgcagtcccatattaatgcggatatgaatggattctcaggtatacaaaattataaagcagctttgcagaaatatataaatatcggttgtgatgtccaaattaccgagcttgatattagtacagaaaacggcaaatttagcttacagcagcaggctgataaatataaagctgttttccaggcagctgttgatataaacagaacctccagcaaaggaaaggttacggctgtctgtgtatggggacctaatgacgccaatacttggctcggttcacaaaatgcacctcttttgtttaacgcaaacaatcaaccgaaaccggcatacaatgcggttgcatccattattcctcagtccgaatggggcgacggtaacaatccggccggcggcggaggaggaggcaaaccggaagagccggatgcaaacggatattattatcatgacacttttgaaggaagcgtaggacagtggacagccagaggacctgcggaagttctgcttagcggaagaacggcttacaaaggttcagaatcactcttggtaaggaaccgtacggcagcatggaacggagcacaacgggcgctgaatcccagaacgtttgttcccggaaacacatattgtttcagcgtagtggcatcgtttattgaaggtgcgtcttccacaacattctgcatgaagctgcaatacgtagacggaagcggcactcaacggtatgataccatagatatgaaaactgtgggtccaaatcagtgggttcacctgtacaatccgcaatacagaattccttccgatgcaacagatatgtatgtttatgtggaaacagcggatgacaccattaacttctacatagatgaggcaatcggagcggttgccggaactgtaatcgaaggacctgctccacagcctacacagcctccggtactgcttggcgatgtaaacggtgatggaaccattaactcaactgacttgacaatgttaaagagaagcgtgttgagggcaatcacccttaccgacgatgcaaaggctagagcagacgttgacaagaatggatcgataaacagcactgatgttttacttctttcacgctaccttttaagagtaatcgacaaatttcctgtagcagaaaatccttcttcttcttttaaatatgagtcggccgtgcaatatcggccggctcctgattcttatttaaacccttgtccgcaggcgggaagaattgtcaaggaaacatatacaggaataaacggaactaagagtcttaatgtatatcttccatacggttatgatccgaacaaaaaatataacattttctaccttatgcatggcggcggtgaaaatgagaatacgattttcagcaacgatgttaaattgcaaaatatccttgaccacgcgattatgaacggtgaacttgagcctttgattgtagtaacacccactttcaacggcggaaactgcacggcccaaaacttttatcaggaattcaggcaaaatgtcattccttttgtggaaagcaagtactctacttatgcagaatcaacaaccccacagggaatagccgcttcaagaatgcacagaggtttcggcggattctcaatgggaggattgacaacatggtatgtaatggttaactgccttgattacgttgcatattttatgcctttaagcggtgactactggtatggaaacagtccgcaggataaggctaattcaattgctgaagcaattaacagatccggactttcaaagagggagtatttcgtatttgcggccaccggttccgaggatattgcatatgctaatatgaatcctcaaattgaagctatgaaggctttgccgcattttgattatacttcggatttttccaaaggtaatttttactttcttgtagctccgggcgccactcactggtggggatacgtaagacattatatttatgatgcacttccatatttcttccatgaatga

SEQ ID NO: 444 - protein, 940 aa, Unknown
  Bacterial protein
  DOMAIN (57)...(402): Glycosyl hydrolase family 10
  DOMAIN (428)...(577): Carbohydrate binding domain
  DOMAIN (597)...(617): Dockerin type I repeat
  DOMAIN (631)...(651): Dockerin type I repeat
  SITE (20)...(23): N-glycosylation site. Prosite id = PS00001
  SITE (79)...(82): N-glycosylation site. Prosite id = PS00001
  SITE (210)...(213): N-glycosylation site. Prosite id = PS00001
  SITE (358)...(361): N-glycosylation site. Prosite id = PS00001
  SITE (476)...(479): N-glycosylation site. Prosite id = PS00001
  SITE (606)...(625): Clostridium cellulosome enzymes repeated domain signature. Prosite id = PS00448
  SITE (606)...(618): EF-hand calcium-binding domain. Prosite id = PS00018
  SITE (614)...(617): N-glycosylation site. Prosite id = PS00001
  SITE (640)...(652): EF-hand calcium-binding domain. Prosite id = PS00018
  SITE (640)...(659): Clostridium cellulosome enzymes repeated domain signature. Prosite id = PS00448
  SITE (644)...(647): N-glycosylation site. Prosite id = PS00001
  SITE (648)...(651): N-glycosylation site. Prosite id = PS00001
  SITE (711)...(714): N-glycosylation site. Prosite id = PS00001
  SITE (781)...(784): N-glycosylation site. Prosite id = PS00001
  SITE (875)...(878): N-glycosylation site. Prosite id = PS00001
MAGEWTEISAKYKAPKTAVNITLSITTDSTVDFIFDDVTITRKGMAEANTVYAANAVLKDMYANYFRVGSVLNSGTVNNSSIKALILREFNSITCENEMKPDATLVQSGSTNTNIRVSLNRAASILNFCAQNNIAVRGHTLVWHSQTPQWFFKDNFQDNGNWVSQSVMDQRLESYIKNMFAEIQRQYPSLNLYAYDVVNEAVSDDANRTRYYGGAREPGYGNGRSPWVQIYGDNKFIEKAFTYARKYAPANCKLYYNDYNEYWDHKRDCIASICANLYNKGLLDGVGMQSHINADMNGFSGIQNYKAALQKYINIGCDVQITELDISTENGKFSLQQQADKYKAVFQAAVDINRTSSKGKVTAVCVWGPNDANTWLGSQNAPLLFNANNQPKPAYNAVASIIPQSEWGDGNNPAGGGGGGKPEEPDANGYYYHDTFEGSVGQWTARGPAEVLLSGRTAYKGSESLLVRNRTAAWNGAQRALNPRTFVPGNTYCFSVVASFIEGASSTTFCMKLQYVDGSGTQRYDTIDMKTVGPNQWVHLYNPQYRIPSDATDMYVYVETADDTINFYIDEAIGAVAGTVIEGPAPQPTQPPVLLGDVNGDGTINSTDLTMLKRSVLRAITLTDDAKARADVDKNGSINSTDVLLLSRYLLRVIDKFPVAENPSSSFKYESAVQYRPAPDSYLNPCPQAGRIVKETYTGINGTKSLNVYLPYGYDPNKKYNIFYLMHGGGENENTIFSNDVKLQNILDHAIMNGELEPLIVVTPTFNGGNCTAQNFYQEFRQNVIPFVESKYSTYAESTTPQGIAASRMHRGFGGFSMGGLTTWYVMVNCLDYVAYFMPLSGDYWYGNSPQDKANSIAEAINRSGLSKREYFVFAATGSEDIAYANMNPQIEAMKALPHFDYTSDFSKGNFYFLVAPGATHWWGYVRHYIYDALPYFFHE

SEQ ID NO: 445 - DNA, 2628 bp, Unknown
  Obtained from environmental sample
atgttgaaaaaactggctttagcagccgggatcgcagcagcaacactggctgcatccggttcccatgggcagacgttcgcgtacggcgaagctctgcaaaaatccatctatttttatgaggctcaacaggccggcccactcccggaatggaaccgcgttgcctggcgtggcgactcagttcctgatgacggtgccgacgtcggactggatttacgcggtggctggttcgatgcgggcgaccacgttaagtttggctttccaatggccgcgtcagcgacactcgtcgcctggggaggcgtcgattacaaagacgcgtacgaacagtcggggcaaatggaacatctgcgcaacaacctgcgcttcgtcaatgactactttatcagcgcgcaccccgctccgaacgtgctttacgggcaggttggcgatggcagtgcagaccataccttctggggtcccgctgaggttctgcaccacaagatccccggctcgcgcatttctatgaagattgacgaaagctgcccgggtaccgatctggccgcagagaccgcagcagcgatggccgcgtctgcgatggtttttcagggtgaggacgatgcttacgcagcaaccctgatcactcacgccaaacagctgtggcaatttgctgattcaaccaaaggcacaaccggtacagatacagcctattccaattgcataacaggtgcacagggcttttatacgtcgacgtatggcgtttactacgatgaacttgcctggggtgctctctggttatggcgcgcaactggagaagacttctacctggaacaagccaagcattactacggtttgatgggctttgaaaaccagacgacaactccggtatatacctggtcgcttggctggaacgataaagcgtatgccgtttatgtacttatggccgcacttgtaggtgacgaggtttaccacgcagatgcacagcgctacctggatcactggagcgtcggcgagggtaaccgcacacccaatgggctgattctggtcgactcctggggggtaaaccgctatgcggccaacgcgggttatctcgcactcttttatgcagatgcgattggcagtgaccaccccctttatgatcgttaccacaattttggtaagaagcagatcgatcatatcctgggcgacaaccctgacaaccaaagctacgtcgtcggctttggcgataatttcccaatcaatgttcaccaccgtggctcccacggttcctggtccgacagcatttccaacccggttaatcaacgccatgtgctatacggcgcagttgccggtggtccgcagggcgatacaggctatgaagaagaccgcaatgactatgtgcagaatgaggtcgcaacagactacaactcaggcttcaccagtgccgtcgctgcactttatgatcactatggtggcgcgcccctggcgaacttcccgcctcccgaaccagagtcggtggagtatctggtgggggccaagatcaattcctctggcaaccgcttcgtggaaatgaaagccgttattcaaaaccacagcacaacacccgcccaaggtaaagacgacctttacatgcgctatttctatgatctgagcgaagtatttgccgcaggctacagtttgaatgatctaacggtggcgtccggatacaaccaagcctcggatgtgaatggcctgcaacattgggatggcaacgtctactatgtggaagcccagttctatgacgatgtggtatttcccggtggtcagtccgcgcaccgacgggaagtacaatttcgcgtgtccctgccaaccacatccaatcttgccgagtgggacaacacgaacgacccctcgtttgatccaagttatttaacggtcgatagtagtctgacttacggtatcgacgcgccgaaaattccactctacgacgccaacggcctgctctggggcgaggagccaccccgtggcggaacttcctccagctcatcgtcgagcagttcgtcctctagctcatccagcagttcatcgtcgagcagctcctcgagcagttcgtcctcgagtaattcgtcctctagctcgtccagctcttcgtcgaattcttcgtcgtctaacagcagttcctcgtccagctcaagctcatcgagcagttccagttcgtcgagttcgggcggcacctgtgcggacgtgaacgtataccccaactggaccgcacgtgactgggccggtggagtaccgaaccacgcggaagccggtgatttgatggtttaccaaggtactgtctaccaagctaattggtacaccaacagtgtgcctggcagtgatgcatcctggaccaaccaagggttatgtgccggcggcggatccagctccagcagctcatcatccagctcaagcagctcttcgtccagcagcagctcaagctcgtccagtggtgcgtccggttcatcctccagctcgagcagttcgtcctcgtcaagttcgagcagcagctcttcgagttcgtcttctggtggcggcgccatgtgtaactggtatggctggcaagtacctatttgtgaaaacaccccatctggctggggcaacgaaaatggccaaacatgtgtcggccccgatacttgccaagaggtcgtcaactag

SEQ ID NO: 446 - protein, 875 aa, Unknown
  Obtained from environmental sample
  SIGNAL (1)...(23)
  DOMAIN (27)...(470): Glycosyl hydrolase family 9
  DOMAIN (492)...(575): Cellulose binding domain
  DOMAIN (741)...(774): Carbohydrate binding domain
  SITE (285)...(288): N-glycosylation site. Prosite id = PS00001
  SITE (397)...(400): N-glycosylation site. Prosite id = PS00001
  SITE (399)...(415): Glycosyl hydrolases family 9 active sites signature 1. Prosite id = PS00592
  SITE (506)...(509): N-glycosylation site. Prosite id = PS00001
  SITE (521)...(524): N-glycosylation site. Prosite id = PS00001
  SITE (695)...(698): N-glycosylation site. Prosite id = PS00001
  SITE (706)...(709): N-glycosylation site. Prosite id = PS00001
  SITE (711)...(714): N-glycosylation site. Prosite id = PS00001
  SITE (742)...(745): N-glycosylation site. Prosite id = PS00001
MLKKLALAAGIAAATLAASGSHGQTFAYGEALQKSIYFYEAQQAGPLPEWNRVAWRGDSVPDDGADVGLDLRGGWFDAGDHVKFGFPMAASATLVAWGGVDYKDAYEQSGQMEHLRNNLRFVNDYFISAHPAPNVLYGQVGDGSADHTFWGPAEVLHHKIPGSRISMKIDESCPGTDLAAETAAAMAASAMVFQGEDDAYAATLITHAKQLWQFADSTKGTTGTDTAYSNCITGAQGFYTSTYGVYYDELAWGALWLWRATGEDFYLEQAKHYYGLMGFENQTTTPVYTWSLGWNDKAYAVYVLMAALVGDEVYHADAQRYLDHWSVGEGNRTPNGLILVDSWGVNRYAANAGYLALFYADAIGSDHPLYDRYHNFGKKQIDHILGDNPDNQSYVVGFGDNFPINVHHRGSHGSWSDSISNPVNQRHVLYGAVAGGPQGDTGYEEDRNDYVQNEVATDYNSGFTSAVAALYDHYGGAPLANFPPPEPESVEYLVGAKINSSGNRFVEMKAVIQNHSTTPAQGKDDLYMRYFYDLSEVFAAGYSLNDLTVASGYNQASDVNGLQHWDGNVYYVEAQFYDDVVFPGGQSAHRREVQFRVSLPTTSNLAEWDNTNDPSFDPSYLTVDSSLTYGIDAPKIPLYDANGLLWGEEPPRGGTSSSSSSSSSSSSSSSSSSSSSSSSSSSSSNSSSSSSSSSSNSSSSNSSSSSSSSSSSSSSSSSSGGTCADVNVYPNWTARDWAGGVPNHAEAGDLMVYQGTVYQANWYTNSVPGSDASWTNQGLCAGGGSSSSSSSSSSSSSSSSSSSSSSSGASGSSSSSSSSSSSSSSSSSSSSSSGGGAMCNWYGWQVPICENTPSGWGNENGQTCVGPDTCQEVVN

SEQ ID NO: 447 - DNA, 2724 bp, Unknown
  Obtained from environmental sample
ttgttttttgaggattacagtgcaaaaccagcttattgggcagtaatagaagcatcaggggcatcaacaacaccagctccaactacaactacaactattacgccaaccccaacagtgacaccaacacctacaccaactgctactccaacgccgacaccgacagtgacggtggcaccgacgccaacaccgagcagcagtccggttgcaggtgggcagataaaggtattgtatgcgaacaaggagaccaatagcacaacgaacacgataaggccatggttgaaggtagtaaatagtggtagcagtgcgatagatttgagcagagtaacgataaggtactggtacacggtagatggagacaaggcacagagtgcggtaagcgactgggcgcagataggagcaagcaatgtgacattcaagtttgtgaagctgagctgtagcgtaagtggagcggactattatttagagataggatttaagagtggagcgggtcagttgcaacctgggaaggacacaggggagatacagataaggtttaacaagagtgactggagcaattacaatcagggaaatgactggtcatggttgcagagcatgacgagttatggagagaatgtgaaggtaacggcgtatatagatggggtattggtatggggtcaggagccgaatggagcgacaccagccccaacagtaacaccgatcccaacaccaactgcgagtgttacaccgacaccgacaccaacaccaacacctacacctacaccaactgctactccaacgccgacaccgacagtgacggtggcaccgacgccaacaccgagcagcagtccggcaacaggtgggcagataaaggtattgtatgcgaacagggagaccaatagcacgacgaacacgataagaccatggttgaaagtagtaaatagtggtagcagtgcgatagatttgagcagggtaacgataaggtactggtacacggtagatggggacaaggcacagagtgcggtaagcgactgggcgcagataggagcaagcaatgtgacattcaagtttgtgaagctgagcagtagcgtaagtggagcggactattatttagagataggatttaagagtggagcgggtcagttgcagcctgggaaggacacaggggagatacagataaggtttaacaagagtgactggagcaattacaatcagggaaatgactggtcatggttgcagagcatgacgagttatggagagaatgtgaaggtaacggcgtatatagatggagtgctggtatggggtcaggagccgagtggagcgactgcagcaccagtagcgacaccaacacctacgccagcacctacagcaactccaacaccgacagcgacaacaacaccaaccccaacagctgctccaacaatcacgccaactccaacaatcacagctaccccgactccaactcccgctccaacatcaacaccggcatattcggacgatacgaatgatgactggctctatgtaagcggcaacaagatagttgataaagacggcagacctgtttggctaacaggtgtgaactggttcggttacaatacaggaacgaatgtatttgatggtgtttggagttgtaatcttaaaagtactcttgcagaaatagcaaatagaggctttaacttattgagagtaccaatctctgcagagttgattctgaactggtcacaaggtatttatccaaagcccaacataaactactatgtaaatccagagcttgagggtaaaaacagtcttgaagtatttgatattgttgtgcagacatgtaaagcggtcggattgaaaattatgttagacatccatagcataaaaacagatgcgatgggacatatatatccagtatggtatgataacaaatacaccccagaagatttctacaaagcttgcgaatggattacgaatagatataaaaatgacgatacaataattgccttcgacctaaaaaatgagccacatggcaaaccttggcaagatgcgacttttgcaaaatgggatgattcaacagatataaataattggaagtatgcggctgagacgtgtgcgaaaagaatactcaacataaatccaaatcttctcatcgtaatagagggaattgaagcatatccgaaagatgatgtgacatggacttctaaatcctcaagcgattactactcgacgtggtggggtggaaacctgcgaggtgtaaggaaatatccaattaaccttggtaaatatcaaaacaaagtggtatattcacctcatgattatgggccgtctgtttaccaacaaccgtggttctatccaggcttcacgaaagaaacattgcttcaagactgctggcgtccaaattgggcatacattatggaagaaaatatagcacccttgttgattggagaatggggtggatacctcgatggaggagataatgaaaagtggatgaaatgtttgcgcgactatattatagaaaatcatatacatcatacattctggtgctttaacgcaaattcaggtgatacaggcggattggtaaagtatgatttcacaacatgggatgagagtaaatacacattcttaaaacctgctctgtggcaagacagacaaggtagatttgttggattagatcacaagcgacctttaggtacgaatggaaagaatattaacgttacaatatactataataacaatgaaccggcaccagtaccggccacaaaataa

SEQ ID NO: 448 - protein, 907 aa, Unknown
  Obtained from environmental sample
  DOMAIN (75)...(157): Cellulose binding domain
  DOMAIN (284)...(366): Cellulose binding domain
  DOMAIN (503)...(843): Cellulase (glycosyl hydrolase family 5)
  SITE (84)...(87): N-glycosylation site. Prosite id = PS00001
  SITE (137)...(140): N-glycosylation site. Prosite id = PS00001
  SITE (181)...(184): N-glycosylation site. Prosite id = PS00001
  SITE (296)...(299): N-glycosylation site. Prosite id = PS00001
  SITE (349)...(352): N-glycosylation site. Prosite id = PS00001
  SITE (393)...(396): N-glycosylation site. Prosite id = PS00001
  SITE (572)...(575): N-glycosylation site. Prosite id = PS00001
  SITE (663)...(672): Glycosyl hydrolases family 5 signature. Prosite id = PS00659
  SITE (903)...(906): N-glycosylation site. Prosite id = PS00001
MFFEDYSAKPAYWAVIEASGASTTPAPTTTTTITPTPTVTPTPTPTATPTPTPTVTVAPTPTPSSSPVAGGQIKVLYANKETNSTTNTIRPWLKVVNSGSSAIDLSRVTIRYWYTVDGDKAQSAVSDWAQIGASNVTFKFVKLSCSVSGADYYLEIGFKSGAGQLQPGKDTGEIQIRFNKSDWSNYNQGNDWSWLQSMTSYGENVKVTAYIDGVLVWGQEPNGATPAPTVTPIPTPTASVTPTPTPTPTPTPTPTATPTPTPTVTVAPTPTPSSSPATGGQIKVLYANRETNSTTNTIRPWLKVVNSGSSAIDLSRVTIRYWYTVDGDKAQSAVSDWAQIGASNVTFKFVKLSSSVSGADYYLEIGFKSGAGQLQPGKDTGEIQIRFNKSDWSNYNQGNDWSWLQSMTSYGENVKVTAYIDGVLVWGQEPSGATAAPVATPTPTPAPTATPTPTATTTPTPTAAPTITPTPTITATPTPTPAPTSTPAYSDDTNDDWLYVSGNKIVDKDGRPVWLTGVNWFGYNTGTNVFDGVWSCNLKSTLAEIANRGFNLLRVPISAELILNWSQGIYPKPNINYYVNPELEGKNSLEVFDIVVQTCKAVGLKIMLDIHSIKTDAMGHIYPVWYDNKYTPEDFYKACEWITNRYKNDDTIIAFDLKNEPHGKPWQDATFAKWDDSTDINNWKYAAETCAKRILNINPNLLIVIEGIEAYPKDDVTWTSKSSSDYYSTWWGGNLRGVRKYPINLGKYQNKVVYSPHDYGPSVYQQPWFYPGFTKETLLQDCWRPNWAYIMEENIAPLLIGEWGGYLDGGDNEKWMKCLRDYIIENHIHHTFWCFNANSGDTGGLVKYDFTTWDESKYTFLKPALWQDRQGRFVGLDHKRPLGTNGKNINVTIYYNNNEPAPVPATK

SEQ ID NO: 449 - DNA, 1089 bp, Unknown
  Obtained from environmental sample
atggctctgagaagcagactggtctctctggcagcggtactggcgaccctcctcggagggctcggtctcagtttcctctggcagaaggacgcgcaggcgcacggcgtggcgatgatgccagggtcgcgcacctacctgtgccagctggacgccgtcaccggcaccggcgcgctcgacccgaccaaccccgcctgcaaggccgcgctcaaccagagcggcgccacggccctctacaactggttcgccgtcctcgactcccaggccggcggacgcggtcagggctacgtcccggacggcacgctctgcagcgcgggcgaccgctccccctacgacttctccgcctacaacgcggcccgctccgactggccgcgcacccacctgacatcgggctcgacgatcaaggtgcagtacagcaactgggccgcgcaccccggtgacttccgggtgtacatcaccaagcccggctggtcgcccacctcgcagctggggtggaacgacctggagctgatccagacggtcaccgacccgccccagcagggctctccgggcgccaacgggggccactactactggaacctgcagctgccctcgggccgttccggtgacgcgctgatcttcatgcagtgggtgcgctcggacagtaaggagaacttcttctcctgctccgacgtggtcttcgacggcggcaacggcgaggtcaccggcatccgcggctccggcacggaccccggcaccgaccccacccccgacccgaccgaccccaccgacccgccgcacaccggtgagtgcatggccgtctacagcgtgaccaactcctggagcggcggcttccagggctccgtcgaggtgatgaaccacgggacgtccccgctgaacggctgggccgtgcagtggaagcccgggcagggcaccacgatcggcagcgcctggaacggcaccctgacgaagggctcggacggcacggtgacggtgcggaacgccgaccacaacagagtgatcccgcccgacgggagtgtgtcgttcggcttcacggccacgtccagcggcaacaacttcccggtgggcacgatcggttgcgtcaatccgtaa

SEQ ID NO: 450 - protein, 362 aa, Unknown
  Obtained from environmental sample
  SIGNAL (1)...(28)
  DOMAIN (19)...(226): Chitin binding domain
  DOMAIN (263)...(359): Cellulose binding domain
  SITE (71)...(74): N-glycosylation site. Prosite id = PS00001
  SITE (315)...(318): N-glycosylation site. Prosite id = PS00001
MALRSRLVSLAAVLATLLGGLGLSFLWQKDAQAHGVAMMPGSRTYLCQLDAVTGTGALDPTNPACKAALNQSGATALYNWFAVLDSQAGGRGQGYVPDGTLCSAGDRSPYDFSAYNAARSDWPRTHLTSGSTIKVQYSNWAAHPGDFRVYITKPGWSPTSQLGWNDLELIQTVTDPPQQGSPGANGGHYYWNLQLPSGRSGDALIFMQWVRSDSKENFFSCSDVVFDGGNGEVTGIRGSGTDPGTDPTPDPTDPTDPPHTGECMAVYSVTNSWSGGFQGSVEVMNHGTSPLNGWAVQWKPGQGTTIGSAWNGTLTKGSDGTVTVRNADHNRVIPPDGSVSFGFTATSSGNNFPVGTIGCVNP

SEQ ID NO: 451 - DNA, 1671 bp, Unknown
  Obtained from environmental sample
atgagacacggtctttccctctcgctgcgggccggcgcgctgctgtgcgtggccgccttcagcggcgccagccacgccgtcgactgcagcggcctggccacgtggaacgccgccaccgcctacaccggcggcgcgcaggtgcaagacagcggccagggctaccgcgcccgctggtggacccagggccaggcaccggccgcccactccggcgaatgggcggtgtggcagcgcctgggcgcctgcgacggcggcacgcccccgggcggcggcaaccagccgccggtggccagcttctcgctgcagcaggaccggctgagcgtcagcttcgacgccagcgcctccaccgaccccgacggcagcatcgtgggctggagctggagcttcggcgacggcggcagcgccagcggcgccagggtgagccgcacctacgccgccccgggcacctacgcggtgacgttgacggtgcgcgacaaccagggcgcgcagaccagcaagagccagagcgtcagcgtggcctcggtggtgaaggacccagccaccggcaagtacatcctgcggcgcagcgacctgcaggcgcaggaagcggcgctgaccaacacgccggtgttccgggccgtgaaggacagcgtgcagacccgcacgcaggcggtggtcgacgcgatcgcacccggtgcgcccgccaaccccgagaacgtcaagcgcgtggagcgcctgctgccgcaggccacctggaaccacctgttcccgctgcgccacccgtcctacacctacaccggcttcctgcaggcggtgggcaagttcgccggcatgtgccgcagctatggcgacggccgcgatgcggacgccatctgccgcaagaccctggccacgatgtttgcccacttcgcgcaggagaccggcgcccacgaccgccacaacgcggtgcccgagtggcgccaggcgctgtacttcgtacgggaatcgggctgcagcgaaaccgcctacagctgcccctacaacgccgaatgcgaccccaacacctggcagggccagacctgggtgtgcggcaaggacgcgcagggccgcttcaagcagtatttcgggcgcggggccaagcagctgtcctacagctacaactacggccccttctccgacgcgatcttcggcaaccccaaggtgctgctggacgcccccgagcaggtggccgacacctggctgaacctggcctcggcggtgttcttcctggtgtacccggcctcgcccaagcccagcatgctgcacgtgatcgacggcacctgggtgcccaacgcggtggacgcggccgccggcatccagcccggcttcggcgccaccaccaacatcatcaacggcggcctcgaatgcggccagggcagcgaaaagccccagtcggtgaaccgcatcgcctactaccgggagcacgcggccgcgctgggcgtgcccatcgcccccggcgaagcgctgggctgcgccacccagggccgcttcgcggtgggcggcgccggtgcgctggacctctactgggaccaggactgggcctaccgccccgacatgcccgagggcaagtccttcgcgtgcaagctggtggcctaccagacggcccacgccgcgctgaaggccggtgactaccagcgctgcgtggagaagtacttcgacgtcatcgtgcagccctga

SEQ ID NO: 452 - protein, 556 aa, Unknown
  Obtained from environmental sample
  SIGNAL (1)...(26)
  DOMAIN (32)...(75): Carbohydrate binding domain
  DOMAIN (100)...(171): PKD domain
  DOMAIN (238)...(489): Chitinase class I
MRHGLSLSLRAGALLCVAAFSGASHAVDCSGLATWNAATAYTGGAQVQDSGQGYRARWWTQGQAPAAHSGEWAVWQRLGACDGGTPPGGGNQPPVASFSLQQDRLSVSFDASASTDPDGSIVGWSWSFGDGGSASGARVSRTYAAPGTYAVTLTVRDNQGAQTSKSQSVSVASVVKDPATGKYILRRSDLQAQEAALTNTPVFRAVKDSVQTRTQAVVDAIAPGAPANPENVKRVERLLPQATWNHLFPLRHPSYTYTGFLQAVGKFAGMCRSYGDGRDADAICRKTLATMFAHFAQETGAHDRHNAVPEWRQALYFVRESGCSETAYSCPYNAECDPNTWQGQTWVCGKDAQGRFKQYFGRGAKQLSYSYNYGPFSDAIFGNPKVLLDAPEQVADTWLNLASAVFFLVYPASPKPSMLHVIDGTWVPNAVDAAAGIQPGFGATTNIINGGLECGQGSEKPQSVNRIAYYREHAAALGVPIAPGEALGCATQGRFAVGGAGALDLYWDQDWAYRPDMPEGKSFACKLVAYQTAHAALKAGDYQRCVEKYFDVIVQP

SEQ ID NO: 453 - DNA, 1503 bp, Unknown
  Obtained from environmental sample
gtgtcgcgcaacccgaacgccaacagctacaattcgggcacccaggtgacggtcaccgccacggcggcgcaggggtacacgtttacgggatggagcggagcctccaccgcaacgacctcgggcgtgaccgttacgatgaacggcaacctgacgctgaccgccaacttccagcaggcccagcagacgtacacgcttacgacaaacgtctacccgtccggcggcgggacggtgtcgcgcagccccgccggccagggctccggcggtttgaatcacgcctccgggtcaacggtcacgctgacggcggcaccggcgacgggctacacgttcgtcaattggacgggcgagggggtggcaagccccaataacgcaaccacctctgtatccatgaccgccaataggacggtaaccgccaacttccagcaacagggcggtaacggtaatggaaacggtaacgggggcgggaacaatacgaacggggatatcaagctgaccataaagatcgaaccggctaattcgggcagggtggacgtgacccccaagaaggacggctaccagcagcaggaacctataacggtcaccgcagtggcgaactccggctacgcctttgaccgatgggacggggacgacttggtggactccgagccgacgaagtcgacggtcatgtggtggcaccgcaccatcaccgcacggttcaaacagagcgcggtcatcaaggacactgtggtaaaccctcccggcggatctaaccctccggtcgggtccacgcctccgggaggatccacccctccgggaggcggcaccgtcgatccgccggtagacaacggctccgtcacgaggacggacacggcgtacatagaggcggaagactacttctccaagagcggcgctcttaccgttgaggataaggacggcgtgacgaatatcggcaacatcgaaaacggacactccgccacatacaaggtgactgtcgaaaaagcaggcgcgttcagcttgggattcaggttggccaccaaccaaaacaactgcgcgttcacggtatcggtgaacggcgcggcggcaggcagcgtgaccagcaacaacacgggcggttggtactcgtaccgtttggtgttcctgcccggcggcgtgaacctcaacgagggcgtgaatactatcgtattgaatttccaaacgcccgtcaacatagactacctgatgctcttgggcgaacccgggtcgtccccgagtttaacgcccgtgaggtacacccctgcggcggctattaaggcgcgcgccgcggtaaccgtgaaaccgaccgcgcgcggcttcatcgcgacgctgccggcggggcacggtttcaccgcgtatagggtgatcaacctgcagggcagggaggtcaagtccggcaggatcggcggcgcggctgcggatgtcagcgtgggcgggttgaagcacagcgtggtcttcctgaggcttgaggggaaggggcaggcgccgctgtcgcttaaggttgttacttattga

SEQ ID NO: 454 - protein, 500 aa, Unknown
  Obtained from environmental sample
  DOMAIN (286)...(402): Carbohydrate binding module (family 6)
  SITE (49)...(52): N-glycosylation site. Prosite id = PS00001
  SITE (112)...(115): N-glycosylation site. Prosite id = PS00001
  SITE (123)...(126): N-glycosylation site. Prosite id = PS00001
  SITE (134)...(137): N-glycosylation site. Prosite id = PS00001
  SITE (157)...(160): N-glycosylation site. Prosite id = PS00001
  SITE (278)...(281): N-glycosylation site. Prosite id = PS00001
  SITE (364)...(367): N-glycosylation site. Prosite id = PS00001
MSRNPNANSYNSGTQVTVTATAAQGYTFTGWSGASTATTSGVTVTMNGNLTLTANFQQAQQTYTLTTNVYPSGGGTVSRSPAGQGSGGLNHASGSTVTLTAAPATGYTFVNWTGEGVASPNNATTSVSMTANRTVTANFQQQGGNGNGNGNGGGNNTNGDIKLTIKIEPANSGRVDVTPKKDGYQQQEPITVTAVANSGYAFDRWDGDDLVDSEPTKSTVMWWHRTITARFKQSAVIKDTVVNPPGGSNPPVGSTPPGGSTPPGGGTVDPPVDNGSVTRTDTAYIEAEDYFSKSGALTVEDKDGVTNIGNIENGHSATYKVTVEKAGAFSLGFRLATNQNNCAFTVSVNGAAAGSVTSNNTGGWYSYRLVFLPGGVNLNEGVNTIVLNFQTPVNIDYLMLLGEPGSSPSLTPVRYTPAAAIKARAAVTVKPTARGFIATLPAGHGFTAYRVINLQGREVKSGRIGGAAADVSVGGLKHSVVFLRLEGKGQAPLSLKVVTY

SEQ ID NO: 455 - DNA, 774 bp, Thermobifida fusca
atgcggaggcacggacggggacgggggcgacgcggcgcccaccgcgcagagcccaccggcagcggcccactggccacagtgggccatgtgctgggcagcaccgttcccaaacgcgtatccccaccgcggccgctgcgcgtcgcggtggtctccggagcgatcgtcggcgcgttgctgttcagctacagcaccacccagatctacctgcgttttaccgaacctgaccagacgccgccggcaccgagcgtcaccacgtcggcagccccgccgacggacggacacggcagcccgcaggcagcgatctccacgcaagtggagatcaccgtgggggccgaggagagcagcgccccctccccgtcacaggacgcacccgacggaacggagcgcacggcaccggttccagatcccggagaaacggccccgcccggcggacaccagtctttccccgtcccgcagagcgcgcccggaaccccgcgggtttcctaccagaaaatcgcctacgacgagacccatttcatggggcatgtgacgatcaccaatgccagcgatgccgtggtggagaactgggaactgcgagtgaagttcagcgacgcccgcatcgtctccgcctggggcaccgaatgggaaccggtccccggcgggttcatcgcccgccagccgcactggtccaacggtattcccccggggcagtccatcaccatcagcttcacggcgcggggcaccagtcacaccccggaaagctgctcgttcaacggcgtgccctgctccctgtga

SEQ ID NO: 456 - protein, 257 aa, Thermobifida fusca
  DOMAIN (158)...(255): Cellulose binding domain
  SITE (182)...(185): N-glycosylation site. Prosite id = PS00001
MRRHGRGRGRRGAHRAEPTGSGPLATVGHVLGSTVPKRVSPPRPLRVAVVSGAIVGALLFSYSTTQIYLRFTEPDQTPPAPSVTTSAAPPTDGHGSPQAAISTQVEITVGAEESSAPSPSQDAPDGTERTAPVPDPGETAPPGGHQSFPVPQSAPGTPRVSYQKIAYDETHFMGHVTITNASDAVVENWELRVKFSDARIVSAWGTEWEPVPGGFIARQPHWSNGIPPGQSITISFTARGTSHTPESCSFNGVPCSL

SEQ ID NO: 457 - DNA, 1311 bp, Thermobifida fusca
atgagaagccggctcgctgcttttggcgcactcgctggcttgactgcaaccctcgccgccgtcacaccggccgaggatgcttacgcgcacggcgcgatgacctaccccccgacgcgtagctacatctgctacgtcaacggcatcgaggggggccagggcggcaacatcgcgcccaccaaccccgcttgccagaacctgcttgcggagaacggcaactacccgttctacaactggttcggcaacctcatcagcgacgctggtggccggcaccgcgagatcatcccggacggccagctctgcggcccccacccgcagttcagcggcctgaacctggtcagcgagcactggcccaccaccacgctggtggccggaagcaccatcaccttccagtacaacgcctgggcaccgcaccccggcacctggtacctgtacgtcaccaaggatggctgggatcccaactccccgctgggttgggacgacctggagcctgttcccttccacacggtcaccgacccgccgatccgtcctggtggccccgagggaccggagtactactgggacgccacgctgcctaacaagtcgggccgccacatcatctactcgatctggcagcgctccgacagcccggaggccttctacgactgcaccgacgtggtgttcgtcggcggcggcgacgacggcggttcgggcggtcctcagccggacactgaggcgcccactgctcccggcaccccggtggctggttccctgaacggcacctccgcccagatcagctggcctgctgcaaccgacaacgtcggtgtcgccgagtaccgggtgtacaacgcggccaacgacgagctgctggccacgactcgcaccaccagcgtcaccctcaccgggctgacgccgaacaccgactactcgatctacgtcgtggcgcgcgacgcggcgggcaacacctcgagcccgtcggcgacgctgaccttcaactcgggtgacgctcccgcgctcgcctgcgagatcgagtacagcacacccaacacctggtacggcggattcaccgcccaggtgcggatctacaacggcagccacgagtccatcgacggctgggaactgacgtgggacttcaccaacggtgagaccatcaaccaggcgtggaacgccactgcccagcagtccggaaccaccgtgacggtcaccaacgtctcgtggaacagcaccattccgcaccacggctcggtggagttcggcttcaacgccaactccacgcgggagccgggagtgccggagaacttcaagctcaacggcagcctctgctccgtggcctaa

SEQ ID NO: 458 - protein, 436 aa, Thermobifida fusca
  SIGNAL (1)...(19)
  DOMAIN (15)...(220): Chitin binding domain
  DOMAIN (239)...(318): Fibronectin type III domain
  DOMAIN (333)...(433): Cellulose binding domain
  SITE (194)...(197): N-glycosylation site. Prosite id = PS00001
  SITE (254)...(257): N-glycosylation site. Prosite id = PS00001
  SITE (317)...(320): N-glycosylation site. Prosite id = PS00001
  SITE (360)...(363): N-glycosylation site. Prosite id = PS00001
  SITE (386)...(389): N-glycosylation site. Prosite id = PS00001
  SITE (401)...(404): N-glycosylation site. Prosite id = PS00001
  SITE (405)...(408): N-glycosylation site. Prosite id = PS00001
  SITE (421)...(424): N-glycosylation site. Prosite id = PS00001
  SITE (435)...(438): N-glycosylation site. Prosite id = PS00001
MRSRLAAFGALAGLTATLAAVTPAEDAYAHGAMTYPPTRSYICYVNGIEGGQGGNIAPTNPACQNLLAENGNYPFYNWFGNLISDAGGRHREIIPDGQLCGPHPQFSGLNLVSEHWPTTTLVAGSTITFQYNAWAPHPGTWYLYVTKDGWDPNSPLGWDDLEPVPFHTVTDPPIRPGGPEGPEYYWDATLPNKSGRHIIYSIWQRSDSPEAFYDCTDVVFVGGGDDGGSGGPQPDTEAPTAPGTPVAGSLNGTSAQISWPAATDNVGVAEYRVYNAANDELLATTRTTSVTLTGLTPNTDYSIYVVARDAAGNTSSPSATLTFNSGDAPALACEIEYSTPNTWYGGFTAQVRIYNGSHESIDGWELTWDFTNGETINQAWNATAQQSGTTVTVTNVSWNSTIPHHGSVEFGFNANSTREPGVPENFKLNGSLCSVA

SEQ ID NO: 459 - DNA, 594 bp, Unknown
  Bacterial DNA
atgcgcaaaaagtcagtcgggtcggcggtggtggcgctcggcgtcgccggcgccaccctcctcgccaccggtagtgccggcagtcacggctacaccgactcgccgatcagccgccagaagctctgcgccaacggcaccgtgaccaactgcggctccatacagtgggagccccagtcggtcgaggggcccaagggcttccccgccgccggccccgccgacggcaagatctgttccgccgggctcacgcagttcgcccagctggacgacccccggggcggtgcgtggcccgcgacgcagctcacggcgggccagagctacagcttccgctggcagttcacggcccggcaccgcaccaccgacttcaagtactacatcaccaagaacggctggaacccgagtcagaagctgacccgggccgcgctcgacccccagccgttcctgaccgtcccctacaacaaccagcagccgccggcgacgctctcgcactcggggacgatcccggcgggcaagacgggccgtcatctgatcctggcggtgtggacgatcgcggacaccgcgaacgccttctacgcctgctcggacgtcaagttctga

SEQ ID NO: 460 - protein, 197 aa, Unknown
  Bacterial protein
  SIGNAL (1)...(30)
  DOMAIN (14)...(197): Chitin binding domain
  SITE (44)...(47): N-glycosylation site. Prosite id = PS00001
MRKKSVGSAVVALGVAGATLLATGSAGSHGYTDSPISRQKLCANGTVTNCGSIQWEPQSVEGPKGFPAAGPADGKICSAGLTQFAQLDDPRGGAWPATQLTAGQSYSFRWQFTARHRTTDFKYYITKNGWNPSQKLTRAALDPQPFLTVPYNNQQPPATLSHSGTIPAGKTGRHLILAVWTIADTANAFYACSDVKF

SEQ ID NO: 461 - DNA, 1572 bp, Unknown
  Bacterial DNA
ttgctcgtcggttgtggcttttttccattcttcatacaacttgttgatttgttctatgaaggtcaattctccgggggcaggaagaaggaagtattttttcaagaattcgtcatgagacaggagaccgatgaaaatgctcgtttcgagtttcagcttggaaggtataccggcacggtctggatagacgacgtagtgatggaggacatcggtgttctcgaggtaagcggtgaggaaaacgaaatctacaccgaggaggatgaagacaaagtggaagactggcagctcgtttggagtcaggagttcgatgacggtgttatcgatccgaacatctggaacttcgagataggaaacggtcatgcaaaaggtattccaggctggggtaacggggaactcgagtactatacagacgaaaacgcgttcgttgagaacggctgtcttgtgattgaggcaagaaaagaacaggtttccgatgagtacggcacctacgactacacctcagccaggatgaccacagaaggaaaattcgaaataaagtacggaaaaatcgaaataagggcaaaacttccaaaaggaaaaggtatctggcccgctctctggatgctcggaaacaacataggagaggtcggatggcccacctgtggtgagatagacatcatggaaatgcttggccacgacaccagaaccgtttatggaacagcacacggtccgggatattctggtggtgcgagtataggtgttgcctatcatcttccagaaggagttcctgatttctccgaagacttccacattttctccatcgagtgggacgaagacgaagtggagtggtacgtggacggacagctctaccacgtcctcagcaaggatgaactggccgaactcggtcttgagtgggttttcgaccatccgttcttcctcattctgaacgttgccgtgggaggctactggccgggttatcccgacgaaaccacccaattcccgcagagaatgtacatcgactacatcagagtctataaagatatgaatccggaaacaatcaccggggaagtggatgactgcgaatatgaacaagcacagcagcaggcaggtcccgaggtgacctatgaacagataaataacggcactttcgacgaacctattgtgaacgatcaggccaacaacccggacgaatggttcatttggcaggcgggagattacgggatcagcggtgccagggtctccgattacggtgtcagggatggctacgcttatatcacgatagccgatcctggaactgacacgtggcatattcagttcaaccagtggataggtctttacagaggaaaaacctacaccatttctttcaaagcaaaagcggatacaccaagacctataaatgtgaaaattctgcagaatcacgatccctggaccaactattttgctcaaacggtgaatctcacagcggactggcagacgttcacgttcacctacacgcatccagacgatgcggatgaggtcgttcagatcagtttcgaactcggagaaggaacggcaactacgatttatttcgatgatgtcacggtgagccctcaatga

SEQ ID NO: 462 - protein, 523 aa, Unknown
  Bacterial protein
  DOMAIN (129)...(335): Glycosyl hydrolases family 16
  DOMAIN (367)...(523): Carbohydrate binding domain
  SITE (377)...(380): N-glycosylation site. Prosite id = PS00001
  SITE (484)...(487): N-glycosylation site. Prosite id = PS00001
MLVGCGFFPFFIQLVDLFYEGQFSGGRKKEVFFQEFVMRQETDENARFEFQLGRYTGTVWIDDVVMEDIGVLEVSGEENEIYTEEDEDKVEDWQLVWSQEFDDGVIDPNIWNFEIGNGHAKGIPGWGNGELEYYTDENAFVENGCLVIEARKEQVSDEYGTYDYTSARMTTEGKFEIKYGKIEIRAKLPKGKGIWPALWMLGNNIGEVGWPTCGEIDIMEMLGHDTRTVYGTAHGPGYSGGASIGVAYHLPEGVPDFSEDFHIFSIEWDEDEVEWYVDGQLYHVLSKDELAELGLEWVFDHPFFLILNVAVGGYWPGYPDETTQFPQRMYIDYIRVYKDMNPETITGEVDDCEYEQAQQQAGPEVTYEQINNGTFDEPIVNDQANNPDEWFIWQAGDYGISGARVSDYGVRDGYAYITIADPGTDTWHIQFNQWIGLYRGKTYTISFKAKADTPRPINVKILQNHDPWTNYFAQTVNLTADWQTFTFTYTHPDDADEVVQISFELGEGTATTIYFDDVTVSPQ

SEQ ID NO: 463 - DNA, 1782 bp, Unknown
  Obtained from environmental sample
gtgtcaatgataacgccaaaaacaaagtcttatggcttggcagccatgctcagccttggtttggcagttgccaaccaaaacgctaatgcaggctgcgtttataaaattactaatgattggggggcgggcctaaccggcgaaatcgtcatcaccaacagcggcagctctgccgtgaatggctggaatattggttggcagtacgccaccaatcgcatcaccagttcatggaatgtaaaccttagcggaagtaatccatattctgcctccaacatcagttggaatggaaatttacaaccaggccaaagtgccagctttggttttcaagtggataagcgcggtggttccgccgaagtacccactattaccggttcggtctgctcgggcacagtgaccagttcggccgccccttcaagcacgccggttcgctccagcagttcaactgcggtggcgagtagttccaacaataataacggcggccagcaatgtaattggtatggaacaatcattccgctgtgcgtaaataccgcgagtggctggggttgggaaaataaccaaacctgcgtttcccgttcggtttgcaccacgattgttaacggatcatcttcagcaacaccgtcttcaacgccaattgtttcatccagttcaagatcatcctcgtcagtaccgattgttccttccagttcatcgccttccagctcctcatcgtcaaataacaataaccagggcattgcaccattggttgtgcaaggcaataaagtgaccgccaatggccagcccgcgaatttggctggcatgagtttgttctggagcaacaccggctggggtggcgagaagtattacaactcgcaagccgttgcctggttgaagtctgactggaaagccaatctggttcgcgccgccatgggggttgatgaagccggtggttatctcaccgactcaaccaacaaaacacgtgttaccgcagtggttgatgcagcaattgccaacaatatgtatgtgattatcgattggcacacgcatcacgctgaagataacaaagcggccgccatcgccttctttaaagaaatggcgaccaaatacggcagctataacaatgtgatttacgaggtgtacaacgagccactgcaagtttcctggagcagtgtgatcaagccgtatgcgactgatgtgatccgtgagattcgcgcaatcgatccggacaacctgatcattgtcggtaccccaagctggtcgcaggatgtggatgtcgcggcgaatgacccgatcactgcgtacaccaacatcgcttacaccttgcacttctactcaggtacccataaacaattcctgcgcgacaaagcacaaacggcattgagcaaaggtattgcgttattcgtgaccgagtggggttcagtgaatgccgacggtaatggcgcagtggacaccgctgaaaccaacgcctggttaagcttcctgaaaaccaacggtatcagccacgcgaattgggcattgaacgataaagccgaaggttcatctgcattaactcccggagcaagtgctaacggaggttggagcagtggtcaattgaccgcttcaggatcattggtacgcaacgcgattatcaccaataacaataacggcaacaccagctctgtcgcgactacttcaacatcttccagtgttagctcgattaataccaacccgagcaccattgcaccggacaatgcgaagattcgctacaacggtcgcgtcagcctcaactccactgctgcgctttacgattgggcaaatacccaaatcgaa

SEQ ID NO: 464 - protein, 594 aa, Unknown
  Obtained from environmental sample
  DOMAIN (30)...(126): Cellulose binding domain
  DOMAIN (250)...(505): Cellulase (glycosyl hydrolase family 5)
  SITE (80)...(83): N-glycosylation site. Prosite id = PS00001
  SITE (91)...(94): N-glycosylation site. Prosite id = PS00001
  SITE (94)...(107): Cellulose-binding domain, bacterial type. Prosite id = PS00561
  SITE (186)...(189): N-glycosylation site. Prosite id = PS00001
  SITE (201)...(204): N-glycosylation site. Prosite id = PS00001
  SITE (319)...(322): N-glycosylation site. Prosite id = PS00001
  SITE (371)...(380): Glycosyl hydrolases family 5 signature. Prosite id = PS00659
  SITE (549)...(552): N-glycosylation site. Prosite id = PS00001
  SITE (588)...(591): N-glycosylation site. Prosite id = PS00001
MSMITPKTKSYGLAAMLSLGLAVANQNANAGCVYKITNDWGAGLTGEIVITNSGSSAVNGWNIGWQYATNRITSSWNVNLSGSNPYSASNISWNGNLQPGQSASFGFQVDKRGGSAEVPTITGSVCSGTVTSSAAPSSTPVRSSSSTAVASSSNNNNGGQQCNWYGTIIPLCVNTASGWGWENNQTCVSRSVCTTIVNGSSSATPSSTPIVSSSSRSSSSVPIVPSSSSPSSSSSSNNNNQGIAPLVVQGNKVTANGQPANLAGMSLFWSNTGWGGEKYYNSQAVAWLKSDWKANLVRAAMGVDEAGGYLTDSTNKTRVTAVVDAAIANNMYVIIDWHTHHAEDNKAAAIAFFKEMATKYGSYNNVIYEVYNEPLQVSWSSVIKPYATDVIREIRAIDPDNLIIVGTPSWSQDVDVAANDPITAYTNIAYTLHFYSGTHKQFLRDKAQTALSKGIALFVTEWGSVNADGNGAVDTAETNAWLSFLKTNGISHANWALNDKAEGSSALTPGASANGGWSSGQLTASGSLVRNAIITNNNNGNTSSVATTSTSSSVSSINTNPSTIAPDNAKIRYNGRVSLNSTAALYDWANTQIE

SEQ ID NO: 465 - DNA, 1500 bp, Unknown
  Obtained from environmental sample
atgaaacggtcaatctctatttttattacgtgtttattgattacgttattgacaatgggcggcatgatagcttcgccggcatcagcagcagggacaaaaacgccagtagccaagaatggccagcttagcataaaaggtacacagctcgttaaccgagacggtaaagcggtacagctgaaggggatcagttcacacggattgcaatggtatggagaatatgtcaataaagacagcttaaaatggctgagagatgattggggtatcaccgttttccgtgcagcgatgtatacggcagatggcggttatattgacaacccgtccgtgaaaaataaagtaaaagaagcggttgaagcggcaaaagagcttgggatatatgtcatcattgactggcatatcttaaatgacggtaatccaaaccaaaataaagagaaggcaaaagaattcttcaaggaaatgtcaagcctttacggaaacacgccaaacgtcatttatgaaattgcaaacgaaccaaacggtgatgtgaactggaagcgtgatattaaaccatatgcggaagaagtgatttcagttatccgcaaaaatgatccagacaacatcatcattgtcggaaccggtacatggagccaggatgtgaatgatgctgccgatgaccagctaaaagatgcaaacgttatgtacgcacttcatttttatgccggcacacacggccaatttttacgggataaagcaaactatgcactcagcaaaggagcacctatttttgtgacagagtggggaacaagcgacgcgtctggcaatggcggtgtattccttgatcaatcgagggaatggctgaaatatctcgacagcaagaccattagctgggtgaactggaatctttctgataagcaggaatcatcctcagctttaaagccgggggcatctaaaacaggcggctggcggttgtcagatttatctgcttcaggaacattcgttagagaaaacattctcggcaccaaagattcgacgaaggacattcctgaaacgccatcaaaagataaacccacacaggaaaatggtatttctgtacagtacagagcaggggatgggagtatgaacagcaaccaaatccgtccgcagcttcaaataaaaaataacggcaataccacggttgatttaaaagatgtcactgcccgttactggtataaagcgaaaaacaaaggccaaaactttgactgtgactacgcgcagattggatgcggcaatgtgacacacaagtttgtgacgttgcataaaccaaagcaaggtgcagatacctatctggaacttggatttaaaaacggaacgttggcaccgggagcaagcacagggaatattcagctccgtcttcacaatgatgactggagcaattatgcacaaagcggcgattattcctttttcaaatcaaatacgtttaaaacaacgaaaaaaatcacattatatgatcaaggaaaactgatttggggaacagaaccaaattag

SEQ ID NO: 466 - protein, 499 aa, Unknown
  Obtained from environmental sample
  SIGNAL (1)...(29)
  DOMAIN (47)...(301): Cellulase (glycosyl hydrolase family 5)
  DOMAIN (356)...(437): Cellulose binding domain
  SITE (164)...(173): Glycosyl hydrolases family 5 signature. Prosite id = PS00659
  SITE (296)...(299): N-glycosylation site. Prosite id = PS00001
  SITE (386)...(389): N-glycosylation site. Prosite id = PS00001
  SITE (421)...(424): N-glycosylation site. Prosite id = PS00001
  SITE (446)...(449): N-glycosylation site. Prosite id = PS00001
MKRSISIFITCLLITLLTMGGMIASPASAAGTKTPVAKNGQLSIKGTQLVNRDGKAVQLKGISSHGLQWYGEYVNKDSLKWLRDDWGITVFRAAMYTADGGYIDNPSVKNKVKEAVEAAKELGIYVIIDWHILNDGNPNQNKEKAKEFFKEMSSLYGNTPNVIYEIANEPNGDVNWKRDIKPYAEEVISVIRKNDPDNIIIVGTGTWSQDVNDAADDQLKDANVMYALHFYAGTHGQFLRDKANYALSKGAPIFVTEWGTSDASGNGGVFLDQSREWLKYLDSKTISWVNWNLSDKQESSSALKPGASKTGGWRLSDLSASGTFVRENILGTKDSTKDIPETPSKDKPTQENGISVQYRAGDGSMNSNQIRPQLQIKNNGNTTVDLKDVTARYWYKAKNKGQNFDCDYAQIGCGNVTHKFVTLHKPKQGADTYLELGFKNGTLAPGASTGNIQLRLHNDDWSNYAQSGDYSFFKSNTFKTTKKITLYDQGKLIWGTEPN

SEQ ID NO: 467 - DNA, 2244 bp, Unknown
  Obtained from environmental sample
atgaaaaagagacaaggttttatcaaaaaagggctggttttgggcgtttcattgcttttgctggcgttgatcatgatgagcgccacatcgcaaacatcggccagtccacagaatccgtttttatggccttataatcaaccgacccacatcagctttaacgaagccgacgtgtatcaggcgtggacggtctggcgcgacgcgcagattacggcgaacaatgcggggggaaacggccgttaccgggtcatgggcggcgtggatggcggcagcaccgtctccgaagggcaggcttacggcattctcttcgcttccatctttgacgagcaaaccctgtttgacggtttgttcctgttcgccaaagaccactataacgaaaacggcgtcatggactggcatatcggcagccctggtgtgcgtattggcagcggcggcgccaccgacgctgaagtggacatggcgttaggattggtcaacgcctgcgtcaaagtgcagaaaaacgcctggcctgccagtccggccggcgtcaactactgcgtcgaagccactaacctgatcaacgccatttatacctacgaggtagaccatgccggcagtgcccctcctggcgggctgcccaacaatcagggcaacgaactgctgcccggtgatacctggaacatcagcgaactttatccacaaggcatcatcaacctctcctacttcccgcccggctatttcaccgttttcggcaagtttacgggcaacgaagccgcctggaacgccgtcatcaatcgcaactatcaggtggtggacatggtgcaggccaaaccgaataactgctccggactggtgcctaactggaataattacaacggcgacgcccaactcgtctcctggcagaccaacaattacagttggtggagctacgacgcggcccgtttcgcctggcgtattgccgtcgatcaggcctggtacggccgttctgaggccgccgaaaccatgaatgaaattggcggtttcttcagcagtaccggcttcaacaacatcggcgaacacaacatgaatgggcagcgggtgggcagtggtccctggcctttctttgtggcgaatgcggcggcggcggtgtgggcagcgcccaatgcaacggccgttaactgcggtacagccacaggttcgctgcaggaaagcgcccaatccgcttataaccgggtgctgaccagcaaagacacgcccaacagctactacggcaacgcctggcggctgttctctatgctgctcatgacgggcaacttccccaacttctacgaaatggccgacggcggcgtcacaccggttcccaccctgccgccgacccagacgccccacgccacccaaccgcctacggcgactgccaccacctcctccggcggcggcgtttgtgccgtggattacgtcattgccaaccagtggggcaatggcttccaggccaacgtcaccatcaccaatcacagcgccgtgccggtgaacggctacactctggcctggacccacgcgccggggcaggttgtcaccaacggctggaacgtgaccatcgcccaaagcggcagcgccgtcagcgccagcaatccggccagttattggaacggcgtgattggagccaacggcggcaaggtttcttttggtttccagggatctctggcaggcggcagcgcggtcgcgcccacttattttgccttgaacggcgctgcctgtaacggggccgtccttccgcccaccgccaccagtgcgccacccacacaaacggccgttccgcccaccgccaccacgatactgcccacacaaacggccgttccccctaccgccaccacgataccacccacacaaacggccgttccgcccaccgccaccagtcaaccaccgacgcaaacggccgttccccccaccgccacagctaccccgccatccggggttggcgcctgcaccgttgtctacgccatcaccaacgattggggcagcggcttcaccgccaacgtcaccctcaccaataaaagcagcgccgcccttaacggctggactctggcctatgccttccccggcaatcaaaccatcagcaatgcctggaacggaacggccgttcagtcaggtaaaaacgtcagcgtcaccaatgtaggttggaacggcagcctgccgcccaacggtgtcgccagctttggcttccaggcgagctacagcggtagtaacagcgctcctaccagctttacgctgaacgggcagcgatgcgattga

SEQ ID NO: 468 - protein, 747 aa, Unknown
  Obtained from environmental sample
  SIGNAL (1)...(34)
  DOMAIN (38)...(422): Glycosyl hydrolases family 8
  DOMAIN (466)...(570): Cellulose binding domain
  DOMAIN (646)...(746): Cellulose binding domain
  SITE (222)...(225): N-glycosylation site. Prosite id = PS00001
  SITE (233)...(236): N-glycosylation site. Prosite id = PS00001
  SITE (276)...(279): N-glycosylation site. Prosite id = PS00001
  SITE (300)...(303): N-glycosylation site. Prosite id = PS00001
  SITE (378)...(381): N-glycosylation site. Prosite id = PS00001
  SITE (490)...(493): N-glycosylation site. Prosite id = PS00001
  SITE (495)...(498): N-glycosylation site. Prosite id = PS00001
  SITE (521)...(524): N-glycosylation site. Prosite id = PS00001
  SITE (673)...(676): N-glycosylation site. Prosite id = PS00001
  SITE (678)...(681): N-glycosylation site. Prosite id = PS00001
  SITE (696)...(699): N-glycosylation site. Prosite id = PS00001
  SITE (704)...(707): N-glycosylation site. Prosite id = PS00001
  SITE (713)...(716): N-glycosylation site. Prosite id = PS00001
  SITE (722)...(725): N-glycosylation site. Prosite id = PS00001
MKKRQGFIKKGLVLGVSLLLLALIMMSATSQTSASPQNPFLWPYNQPTHISFNEADVYQAWTVWRDAQITANNAGGNGRYRVMGGVDGGSTVSEGQAYGILFASIFDEQTLFDGLFLFAKDHYNENGVMDWHIGSPGVRIGSGGATDAEVDMALGLVNACVKVQKNAWPASPAGVNYCVEATNLINAIYTYEVDHAGSAPPGGLPNNQGNELLPGDTWNISELYPQGIINLSYFPPGYFTVFGKFTGNEAAWNAVINRNYQVVDMVQAKPNNCSGLVPNWNNYNGDAQLVSWQTNNYSWWSYDAARFAWRIAVDQAWYGRSEAAETMNEIGGFFSSTGFNNIGEHNMNGQRVGSGPWPFFVANAAAAVWAAPNATAVNCGTATGSLQESAQSAYNRVLTSKDTPNSYYGNAWRLFSMLLMTGNFPNFYEMADGGVTPVPTLPPTQTPHATQPPTATATTSSGGGVCAVDYVIANQWGNGFQANVTITNHSAVPVNGYTLAWTHAPGQVVTNGWNVTIAQSGSAVSASNPASYWNGVIGANGGKVSFGFQGSLAGGSAVAPTYFALNGAACNGAVLPPTATSAPPTQTAVPPTATTILPTQTAVPPTATTIPPTQTAVPPTATSQPPTQTAVPPTATATPPSGVGACTVVYAITNDWGSGFTANVTLTNKSSAALNGWTLAYAFPGNQTISNAWNGTAVQSGKNVSVTNVGWNGSLPPNGVASFGFQASYSGSNSAPTSFTLNGQRCD

SEQ ID NO: 469 - DNA, 2661 bp, Unknown
  Obtained from environmental sample
atgagtagctttaaagcctctgcgatcaaccctcgcatggcaggtacgctaacgcgttccctctatgcggccgggttctccctggctgtatccactctttccacccaggcctatgccggttgccagtacgtgatcgacagccagtggaataatgggttcggcgccaaaataagaataaccaatgatgggacaactgcgatcaatggctggaatgtgagctggcgatacagcggcgataaccgcattaccagcagttacaacgccaccctgaccggttccaacccctactccgccactaacctgagctggaacgctaccatccagccaaagcaaaccgttgagtttggtttccagggctccaaaggcgccgcagcggctgaagtgccagtgattaccggtacgggttgtggtactgccacctcctcggcagccccatcatcagccccacccgtctcatcagcaccaactaccagctcacgctcctcggccgcgtccagcaatggcactgtccaaggcgtagcacccctggtagtacagggcaacaaagtaaccgccaatggccaaccggccaacctggcgggcatgagcctgttctggagtaacaccggctggggcggcgagaaatactacaacgcccaggtagtttcctggctgaaatccgactggaaagccaatctgatccgtgttgctatgggcacggaagaagccggtggctacctgaccgacgcctccaacaaaacccgtgctaccgccgtaattgatgcggcgattgccaacaacatgtatgtcattatcgattggcatacccatcacgctgaagataacaaggccgctgccattaccttcttcaaggaaatggcaaccaagtacggcaactacaacaacgtgatctatgaggtatacaacgagccgttgaatatctcctggagcggtgtactcaagccatacgcgactgatgtgatccgcgaaatccgtgccattgacccggacaacctgattattgtaggtacgcctaactggtctcaggacgttgacgtagccgctaacgacccgatcaccgcctacagcaacattgcctacaccctgcacttctatgccggtacccacaaacaattcctgcgtgacaaggcgcaaaccgcactgaatcgcggcattgccctgtttgttaccgagtggggtgcagtgaatgccgatggcggtggcggtgtggattcagccgagaccgcgacctggttgaacttcctcaaaaccaacggcatcagccatgccaactgggcattgaatgataaggccgagggcgcttctgccctggtgcccggcgccagtgtcaacggtggctggaccagcgcacaactgaccgcatccggcaccctggtgcgtaacgcgatcatcgccaacaacggcaatgtgaccagctctaccccggctacctcttcacgcagctcggtaccgtccagcagctcggtcgccctcacctccagctcgcgttccagcagctcggtggcgattggcagcagctcgtctaccaacaacaatggcggcggcgtactcttctccgaaacctttgaaaacggtgcagtcaatacccaaccggctggctgggaaaacttcatcggctacgtacgcaacaataacaacaccacctccggttcggcttatgccttgatcgatagcagcaaagcctacagcggtggcaagtctatccgtttcaaaggcggttcatcgccagcgcaaatcgtgcgcgccctgcctgctggcacccaacgcctctacacccgcgcttacgtgaacatgagcgtagctatgggtaatgtggcgggtgacaaccacgaacacatcttcggtatcaagaaaagcttcgatgccaataatgaaattcgtgtcggtcaaatcaaaggggtattgggtaccaaccacgttcctagcgataacatcgcgcccaaacaaagccagtggtacagcggcccgcaaatggcagccaacagatggtactgcgtggaaacggcttacctggccgatgaagcctatgacaccttgcatatgtgggtagatggcaatctggttcacactgtcgattcatctgacgactggaacaacggcgccctgagtgccaattggttgagcgataactttaacttcgtcatgttcggcttccacagcttcagcaaccgcaatgcggatgtctggatggacgacatcgtggtttctacccaacctatcggttgcggtaccgtaaacccacccagcagcagctcggtcgcctcggttgtaccaagctcctccagccgcagctcggtagcaccttcatcatccagcgttgctatcaccagcagttcagtaccttcgtcctctgttgcgccaagctccagcagccgctccagctcgtctgttgccaacaccgctgcctggaacctgaacaccaccgactcctacctgaacttcgtcaccaccaaaaacacccacaacgtcgaagtgcatagcttcaccgggttaacaggtgacatcagcagcgctggcgttgcgaccctgaccattgacctcagcagcgtgagcaccggtgtgacactgcgtgacgagcgtatgagggatttgttgtttgaaacagcgacctatccaacggccaccatcacagtgactgtgccttctaccctgatccactag

SEQ ID NO: 470 - protein, 886 aa, Unknown
  Obtained from environmental sample
  SIGNAL (1)...(39)
  DOMAIN (39)...(136): Cellulose binding domain
  DOMAIN (180)...(435): Cellulase (glycosyl hydrolase family 5)
  SITE (72)...(75): N-glycosylation site. Prosite id = PS00001
  SITE (88)...(91): N-glycosylation site. Prosite id = PS00001
  SITE (101)...(104): N-glycosylation site. Prosite id = PS00001
  SITE (105)...(108): N-glycosylation site. Prosite id = PS00001
  SITE (169)...(172): N-glycosylation site. Prosite id = PS00001
  SITE (248)...(251): N-glycosylation site. Prosite id = PS00001
  SITE (300)...(309): Glycosyl hydrolases family 5 signature. Prosite id = PS00659
  SITE (310)...(313): N-glycosylation site. Prosite id = PS00001
  SITE (344)...(347): N-glycosylation site. Prosite id = PS00001
  SITE (476)...(479): N-glycosylation site. Prosite id = PS00001
  SITE (553)...(556): N-glycosylation site. Prosite id = PS00001
  SITE (606)...(609): N-glycosylation site. Prosite id = PS00001
  SITE (818)...(821): N-glycosylation site. Prosite id = PS00001
MSSFKASAINPRMAGTLTRSLYAAGFSLAVSTLSTQAYAGCQYVIDSQWNNGFGAKIRITNDGTTAINGWNVSWRYSGDNRITSSYNATLTGSNPYSATNLSWNATIQPKQTVEFGFQGSKGAAAAEVPVITGTGCGTATSSAAPSSAPPVSSAPTTSSRSSAASSNGTVQGVAPLVVQGNKVTANGQPANLAGMSLFWSNTGWGGEKYYNAQVVSWLKSDWKANLIRVAMGTEEAGGYLTDASNKTRATAVIDAAIANNMYVIIDWHTHHAEDNKAAAITFFKEMATKYGNYNNVIYEVYNEPLNISWSGVLKPYATDVIREIRAIDPDNLIIVGTPNWSQDVDVAANDPITAYSNIAYTLHFYAGTHKQFLRDKAQTALNRGIALFVTEWGAVNADGGGGVDSAETATWLNFLKTNGISHANWALNDKAEGASALVPGASVNGGWTSAQLTASGTLVRNAIIANNGNVTSSTPATSSRSSVPSSSSVALTSSSRSSSSVAIGSSSSTNNNGGGVLFSETFENGAVNTQPAGWENFIGYVRNNNNTTSGSAYALIDSSKAYSGGKSIRFKGGSSPAQIVRALPAGTQRLYTRAYVNMSVAMGNVAGDNHEHIFGIKKSFDANNEIRVGQIKGVLGTNHVPSDNIAPKQSQWYSGPQMAANRWYCVETAYLADEAYDTLHMWVDGNLVHTVDSSDDWNNGALSANWLSDNFNFVMFGFHSFSNRNADVWMDDIVVSTQPIGCGTVNPPSSSSVASVVPSSSSRSSVAPSSSSVAITSSSVPSSSVAPSSSSRSSSSVANTAAWNLNTTDSYLNFVTTKNTHNVEVHSFTGLTGDISSAGVATLTIDLSSVSTGVTLRDERMRDLLFETATYPTATITVTVPSTLIH

SEQ ID NO: 471 - DNA, 1095 bp, Streptomyces coelicolor
atggttcgacgcaccagactcctcaccctcgcggcggtactggccaccctgctcggctcgctcggcgtgacccttctgctcgggcaggggcgggccgaggcgcacggcgtggcgatgatgcccggctcccgcacctacctgtgccagctggacgccaagaccggcaccggcgccctcgacccgacgaaccccgcctgccaggccgccctcgaccagagcggggcgacggccctgtacaactggttcgccgtgctcgactccaacgcggggggccgcggcgccggttacgtgccggacggcaccctgtgcagcgccggcgaccgttccccgtacgacttctccgcctacaacgccgcccgctcggactggccccgcacgcacctgacgtcgggtgcgacgatcccggtggaatacagcaactgggcggcccaccccggggacttccgggtgtacctgaccaagccgggctggtcgcccacgtccgagctgggctgggacgacctggagctgatccagacggtgaccaacccgccccagcagggctcgccgggcaccgacgggggccactactactgggacctcgcgctgccctcgggccgctcgggcgacgcgttgatcttcatgcagtgggtgcgttcggacagccaggagaacttcttctcctgctcggacgtcgtcttcgacggcggcaacggagaggtcaccggcatccgcggttccgggagcaccccggacccggacccgacaccgaccccgacggacccgaccaccccgcccacgcacaccggctcctgcatggccgtgtactcggtggagaactcctggagcggcggcttccaggggtcggtcgaggtgatgaaccacggcaccgagccgctgaacggctgggccgtgcagtggcagccgggcggcgggaccacgctcggcggggtgtggaacggttcgctgaccagcggctccgacggtacggtcacggtccgcaacgtggaccacaaccgcgtcgtaccaccggacgggagcgtgaccttcggcttcaccgccacttcgacgggcaatgacttcccggtcgactcgatcggctgcgtggcaccctga

SEQ ID NO: 472 - protein, 364 aa, Streptomyces coelicolor
  DOMAIN (20)...(227): Chitin binding domain
  DOMAIN (265)...(361): Cellulose binding domain
  SITE (317)...(320): N-glycosylation site. Prosite id = PS00001
MVRRTRLLTLAAVLATLLGSLGVTLLLGQGRAEAHGVAMMPGSRTYLCQLDAKTGTGALDPTNPACQAALDQSGATALYNWFAVLDSNAGGRGAGYVPDGTLCSAGDRSPYDFSAYNAARSDWPRTHLTSGATIPVEYSNWAAHPGDFRVYLTKPGWSPTSELGWDDLELIQTVTNPPQQGSPGTDGGHYYWDLALPSGRSGDALIFMQWVRSDSQENFFSCSDVVFDGGNGEVTGIRGSGSTPDPDPTPTPTDPTTPPTHTGSCMAVYSVENSWSGGFQGSVEVMNHGTEPLNGWAVQWQPGGGTTLGGVWNGSLTSGSDGTVTVRNVDHNRVVPPDGSVTFGFTATSTGNDFPVDSIGCVAP

SEQ ID NO: 473 - protein, 19 aa, Glycine max
MAKLVFSLCFLLFSGCCFA

SEQ ID NO: 474 - protein, 6 aa, Artificial sequence
  ER retention sequence
SEKDEL

SEQ ID NO: 475 - protein, 11 aa, Artificial sequence
  sporamin vacuolar targeting sequence
RFNPIRLPTTH

SEQ ID NO: 476 - protein, 66 aa, Cyanophora paradoxa
MAFVASVPVFANASGLKTEAKVCQKPALKNSFFRGEEVTSRSFFFASQAVSAKPATTGEVDTTIRA

SEQ ID NO: 477 - protein, 10 aa, Artificial sequence
  protein storage vacuole (PSV) sequence from  beta-conglycinin
PLSSILRAFY

SEQ ID NO: 478 - protein, 19 aa, Artificial sequence
  gamma zein 27 kD signal sequence
MRVLLVALALLALAASATS

SEQ ID NO: 479 - protein, 8 aa, Artificial sequence
  vacuole sequence domain (VSD) from barley polyamine oxidase
DELKAEAK

SEQ ID NO: 480 - DNA, 1518 bp, Artificial sequence
  dicot optimized SEQ ID NO:360
atgcaacagattggaacttacaccgctgagacccatccatctttgtcttggtctacctgcaagtctggtggatcttgcactactaactccggtgctattacccttgatgccaattggagatgggttcacggtgttaacacttccactaactgctacactggaaacacttggaacaccgctatttgcgatactgatgcttcttgcgctcaagattgcgctcttgatggtgctgattactctggaacctacggaattaccacctctggaaactcccttaggcttaacttcgtgaccggatctaatgttggatctaggacctacctcatggctgataacacccactaccagatcttcgatctcctcaaccaggagttcactttcaccgttgatgtgtctcatcttccatgcggacttaacggtgctctttacttcgtgactatggatgctgatggtggagtttccaagtacccaaacaacaaggctggtgctcaatatggtgttggatactgcgattctcaatgcccaagggacctcaagttcattgctggacaggctaacgttgaaggatggaccccatcttctaacaacgctaacaccggacttggaaatcatggtgcttgctgcgctgaacttgatatttgggaggccaactctatttctgaggctcttaccccacatccatgcgatactccaggactttctgtgtgcactactgatgcttgcggaggaacctattcttccgatagatacgctggaacttgcgatccagatggatgcgatttcaacccatacaggcttggagttaccgatttctacggttctggaaagactgttgacaccaccaagccaattactgttgtgacccagttcgttactgatgatggaacttccaccggaaccctttctgagatcagaaggtactacgttcagaacggtgttgttattccacagccatcctccaagatttctggtgtgtccggaaacgtgattaactccgatttctgcgatgctgagatttctactttcggagagaccgcttctttttctaagcacggcggacttgctaaaatgggagctggaatggaagcaggaatggtgcttgtgatgtccctttgggatgattactccgtgaacatgctttggcttgattctacctacccaactaacgctactggaactccaggtgctgctagaggatcttgcccaactacttccggtgatccaaagaccgttgagtctcagtctggatcttcttacgtgaccttctccgatattagagtgggaccattcaactctactttctccggtggatcttctactggtggttcttctactactaccgcttctggaactactactaccaaggcttcttctacctctacctcttctacttctactggaaccggtgttgctgctcattggggacaatgtggaggacaaggatggactggaccaactacttgcgcttcaggaactacctgcaccgttgtgaacccttactactctcagtgcctttga

SEQ ID NO: 481 - DNA, 1368 bp, Artificial sequence
  dicot optimized SEQ ID NO:358
atggttccacttgaggaaaggcagtcttgctcttctgtttggggacaatgcggaggacaaaattgggctggaccattctgttgtgcttcaggatctacctgcgtgtactccaacgattactactctcagtgccttccaggaactgcttcttcttcttcctctaccagggcttcttctactacctctagggtgtcatctgctacttctaccaggtctagctcttctactccaccacctgcttcatctactactccagctccaccagttggatctggaactgctacctactctggaaacccattcgctggtgttacaccttgggctaactcattctacgcttcagaggtgtcaactctcgctattccatctcttactggcgctatggctactgctgctgctgccgttgctaaggttccatctttcatgtggctcgatacccttgataagaccccacttatgtcctctaccctctccgatattagggctgctaacaaggcaggtggaaactatgctggacagttcgtggtttacgatctcccagatagagattgcgctgctgctgcttctaacggtgagtactccattgctgatggtggagtggctaagtacaagaactacatcgataccattaggggtattgtgaccaccttctccgatgtgaggattcttctcgtgattgagccagattctcttgctaacctcgtgactaaccttgctactccaaagtgctctaacgctcagtctgcttaccttgagtgcatcaactacgctattacccagcttaacctcccaaacgtggctatgtatctcgatgctggacatgctggatggcttggatggccagctaatcaggacccagctgctcaacttttcgccaacgtgtacaagaacgcttcttctccaagagctgttaggggacttgctaccaacgttgctaactacaacgcttggaacattactaccccaccatcttacactcagggaaacgctgtttacaacgagaagctctacattcatgctcttggaccacttttggctaaccacggatggtctaacgctttcttcatcaccgatcagggaagatctggaaagcaacctactggacaacttgagtggggaaactggtgtaacgctgttggaaccggattcggaattaggccatctgctaacaccggtgattctctcctcgattcctttgtgtggattaagccaggtggagagtgcgatggaacctctaactcttctgccccaagattcgattaccattgcgcttcagctgatgctcttcaaccagctccacaagctggttcttggtttcaggcctacttcgttcagcttctcactaacgctaacccatctttcctttga

SEQ ID NO: 482 - DNA, 2148 bp, Artificial sequence
  dicot optimized SEQ ID NO:168
atggctactcaaggtgctcttgattctgctgttaccgctcttcagtctgctattaccaccttctctggtgctagacaagatggtgctaagacctctggattcacctctgctcaagtgaccgctcttatcaactctgctaaggctgacaaagagggtgttaggacttctgctaacggtgatgatgtttccccagttgagtactgggttaactcttctgtgctcggagctttcaacgctgctattaccgctttggagaacgcttctggacagtcagctatcgatgctgcttacctcgctcttattcaggctggaaagaccttcaacgatgctaagaggcatggaactactccagataggaccgctctcaacaacgctattaccgcagctgttaacgctaagaacggtgttcaaaccgctgctgataaggatcaggcttctcttggatcttcttgggctactggtgctcaattcaacgctctcaacaccgcaattgattctgctaccgccgttaagaacaacgctaacgctaccaaggcttctgttgatactgctgctgcttctcttaacgctgctatcgctactttcactaccgctgtgactaacaacggaccaggaactcaaaccttcagggatattaccgctgctcaactcgttgctgagatcaagattggatggaaccttggaaactcccttgatgctcacaacggattcccagctaacccaaccgttgatcagatggaaagaggatggggaaacccagctactaccaaggctaacatcaccgctcttaagaacgctggattcaacgctattaggattccagtgtcctggactaaggctgcttctggtgctccaaactacaccattaggaccgattggatgactagggtgaaagagatcgttaactacgctgtggacaacgacatgtacatcatccttaacacccaccatgatgaggatgtgctcaccttcatgaactctaacgctgctgctggaaaggctgctttccaaaagttgtgggagcaaatcgctgctgctttcaaggattacaacgagaagctcattttcgagggacttaacgagccaagaaccccaggatcttctaacgaatggaacggtggaactgatgaagagaggaacaacctcaactcctactacccaatcttcgtgaacactgtgagatcttccggtggaaacaacggaaaaaggattctcatgatcaacccatacgctgcttctatggaagctgtggctatgaacgctcttactctcccagctgattctgctgctaacaagctcattgtgtccttccattcctaccagccatacaacttcgctcttaacaaggactcctccattaacacctggtcctcttcctcttctggtgatacctctccaattaccggaccaatcgacaggtactacaacaagttcgtgtcccaaggtattccagtgatcattggagagttcggcgctatgaacaagaacaacgaggctgttagagcacaatgggctgagtactacgtttcttacgctcagtccaagggtattaagtgcttctggtgggataacggtgttacttctggatctggcgagcttttcggacttcttaacaggaccaacaacaccttcacctacaacgctcttctcaacggaatgatgtctggaactggtggtactgttccaactccaccaactcctccagctactccaactcctcctactaccattaccggaaaccttggaacttaccagttcggaacccaagaggatggtgtgtctcctaactacactcaagctgtgtgggagctttctggaacaaaccttaccactgctaagactaccggtgctaagttggttcttgtgttcaccactgctccaaacgcttctatgcactttgtttggcagggaccagctaattctctttggtggaacgagaaagagattctcggaaacaccggaaacccatctgctactggtgttacctggaactctggaactaagacccttaccattccacttaccgctaactccgtgaaggattactctgttttcaccgcccaaccatcccttaggatcatcatcgcttactacaacggtggaaacgtgaacgatctcggaattgtgtctgctaacctcactcaatga

SEQ ID NO: 483 - DNA, 1518 bp, Artificial sequence
  monocot optimized SEQ ID NO:360
atgcagcagatcggcacctacaccgccgagacccacccaagcctgagctggtccacctgcaagagcggcggttcctgcacgaccaacagcggcgccatcacccttgatgcgaactggcgctgggtgcacggcgtgaacaccagcaccaactgctacacgggtaacacgtggaacaccgccatctgcgacacggacgcttcctgcgcccaggactgcgcgcttgatggcgccgactactccggcacctacggcatcaccacctccggcaacagcctgcgcctgaacttcgtgaccggcagcaatgtgggcagccgcacctacctgatggccgacaacacccactaccagatcttcgacctgctgaaccaggagttcaccttcaccgtcgacgtgtcccacctgccctgcggcctgaacggcgccctctacttcgtgacgatggacgccgacggcggcgtgtccaagtacccgaacaacaaggctggcgcccagtacggtgtgggctactgcgacagccagtgcccgagggacctgaagttcatcgccggccaggccaacgtggagggctggaccccgagcagcaacaacgccaacaccggcctgggcaaccacggcgcctgctgcgccgagctggacatctgggaggccaacagcatcagcgaggccctgaccccacacccatgcgacaccccaggcctgtctgtgtgcaccaccgacgcctgcggcggcacctactccagcgaccgctacgccggcacctgcgacccagacggctgcgacttcaacccgtaccgcctgggcgtgaccgacttctacggcagcggcaagaccgtggacaccaccaagccgatcaccgtggtgacccagttcgtgaccgacgacggcaccagcaccggcaccctgagcgagatccgccgctactacgtccagaacggcgtggtgatcccgcagccgagcagcaagatcagcggcgtgtccggcaacgtgatcaacagcgacttctgcgacgccgagatcagcaccttcggcgagaccgccagcttcagcaagcacggcggcctggccaagatgggcgctggcatggaagccggcatggtgctggtgatgagcctgtgggacgactactccgtgaacatgctgtggctggacagcacctacccgaccaacgccaccgggacgccaggcgctgccaggggcagctgcccaaccacctcgggcgaccccaagaccgtcgagagccagagcggcagcagctacgtgaccttcagcgacatccgcgtgggcccgttcaactccacgttcagcggtggctctagcacgggcggctcctccaccaccaccgccagcggcaccaccaccaccaaggcctccagcacgtctactagctccacctctaccggcaccggcgttgctgcccattggggccagtgcggtggccagggctggacgggtccaacgacttgcgcctccggcaccacctgcaccgtggtcaatccgtactactcccagtgcctgtga

SEQ ID NO: 484 - DNA, 1368 bp, Artificial sequence
  monocot optimized SEQ ID NO:358
atggtgccgctcgaggaaaggcagagctgctcctctgtctggggtcaatgcggtggccagaactgggctggcccgttctgctgcgcctccggtagcacctgcgtgtactccaacgactactactcccagtgcctccccggtacggccagcagcagcagctccacgcgcgcctccagcaccacctccagggtgtccagcgccacctccaccaggtcctccagcagcaccccaccacctgccagctccaccaccccagccccaccagtgggcagcggcacggcgacgtactccggcaaccccttcgccggcgtgaccccttgggccaacagcttctacgccagcgaggtgtccaccctggccatcccaagcctgaccggcgctatggctacggctgcggccgctgtggccaaggtgccgagcttcatgtggctggacacgcttgacaagaccccgctgatgagcagcaccctgagcgacatcagggccgccaacaaggctggcggcaactacgccggccagttcgtggtgtacgacctgccggacagggactgcgctgccgctgcctccaatggtgagtactccatcgccgacggcggcgtggccaagtacaagaactacatcgacaccatccgcggcatcgtgaccaccttcagcgatgtgcgcatcctgctggtgatcgagccggacagcctggccaacctggtgaccaacctggccaccccgaagtgctccaacgcccagagcgcctacctcgagtgcatcaactacgccatcacccagctgaacctgccgaacgtggccatgtacctggacgccggccacgccggttggcttgggtggccagcgaaccaggacccagccgcccagctgttcgccaacgtgtacaagaacgccagcagcccgagggctgtgaggggcctggccaccaacgtggccaactacaacgcctggaacatcaccaccccgccgagctacacccagggcaacgccgtgtacaacgagaagctgtacatccacgccctgggcccactgctggccaaccacggctggtccaacgccttcttcatcaccgaccagggccgcagcggcaagcagccaaccggccagctcgagtggggcaactggtgcaacgctgtgggcaccggcttcggcatcaggccgagcgccaacaccggcgacagcctgctggacagctttgtgtggatcaagccaggcggcgagtgcgacggcaccagcaacagcagcgccccacgcttcgactaccactgcgccagcgccgacgccctccagccagccccacaggccggcagctggttccaggcctacttcgtccagctgctgaccaacgccaacccgagcttcctgtga

SEQ ID NO: 485 - DNA, 2148 bp, Artificial sequence
  monocot optimized SEQ ID NO:168
atggccacccagggcgctctggacagcgccgtgactgcgctccaatccgctatcaccaccttcagcggtgctcgccaggatggcgccaagaccagcggcttcaccagcgcccaggtgaccgccctgatcaacagcgccaaggccgacaaggagggcgtccgcacttctgctaacggcgacgacgtgtccccggtggagtactgggtgaacagcagcgtgctgggcgcgttcaatgctgccatcaccgccctcgagaacgccagcggccagagcgctatcgacgccgcctacctggctctcatccaggccggcaagacgttcaatgacgcgaagcgccacggcaccaccccagacaggaccgccctcaacaacgcgatcaccgccgctgtgaacgccaagaacggcgtccagaccgccgctgacaaggaccaggccagcctgggcagcagctgggctaccggcgctcagttcaacgccctgaacaccgccatcgacagcgccaccgccgtgaagaacaacgccaacgccaccaaggccagcgtggacaccgccgctgccagcctgaacgccgcgatcgccaccttcaccaccgccgtcaccaacaacggcccaggcacccagaccttccgcgacatcaccgctgcccagctcgtggccgagatcaagatcggctggaacctgggcaacagcctggacgcccacaacggcttcccggccaacccaaccgtggaccagatggaacgcggctggggcaacccagccaccaccaaggcgaacatcaccgcgctgaagaacgccggcttcaacgccatccgcatcccggtgtcctggaccaaggccgccagcggcgctccgaactacaccatccgcaccgactggatgacccgcgtgaaggagatcgtcaactacgccgtggacaacgacatgtacatcatcctgaacacccaccacgacgaggacgtgctgaccttcatgaacagcaacgccgctgccggcaaggccgccttccagaagctgtgggagcagatcgccgctgccttcaaggactacaacgagaagctgatcttcgagggcctgaacgagccaaggaccccgggcagcagcaacgagtggaacggcggcaccgacgaggagcgcaacaacctgaacagctactacccgatcttcgtgaacactgtgcgcagcagcggcggcaacaacggcaagcgcatcctgatgatcaacccctacgccgccagcatggaagccgtggccatgaacgccctgaccctgccagccgactccgccgccaacaagctgatcgtgtccttccacagctaccagccgtacaacttcgccctgaacaaggacagcagcatcaacacctggtccagcagcagctccggcgacaccagcccaatcaccggcccgatcgaccgctactacaacaagttcgtgtcccagggcatcccggtgatcatcggcgagttcggcgccatgaacaagaacaacgaggctgtgcgcgcccagtgggccgagtactacgtgtcctacgcccagagcaagggcatcaagtgcttctggtgggacaacggcgtgaccagcggctctggcgagctgttcggcctgctgaaccgcaccaacaacaccttcacctacaacgccctgctgaacggcatgatgagcggcaccggcggcactgtgcccacgccacccacccctccggccaccccaaccccgccaaccaccatcaccggcaacctgggcacctaccagttcggcacccaggaggacggcgtttcccccaactacacccaggctgtgtgggagctgtccggcacgaatctgacgaccgccaagaccacgggcgccaagctggtgctggtgttcaccaccgcgccgaacgccagcatgcactttgtgtggcagggtccagctaatagcctgtggtggaacgagaaggagatcctgggcaacaccggcaacccatctgctacgggcgttacctggaacagcggcaccaagaccctgaccatcccgctgaccgccaacagcgtgaaggactactccgtgttcaccgcccagccgagcctgcgcatcatcatcgcctactacaacggcggcaacgtgaacgacctgggcatcgtgtccgccaacctgacccagtga

SEQ ID NO: 486 - DNA, 1467 bp, Artificial sequence
  monocot optimized SEQ ID NO:34
atgcagcaagtgtgcacccagcaggccgagacccacccaccactgacctggcagaagtgcaccgcctctggctgcacggcccagagcggcagcgtggtgctggacgccaactggcgctggacccacgacaccaagagcaccaccaactgctacgacggcaacacctggtccagcaccctgtgcccagacgacgccacctgcgccaagaactgctgtctggatggtgccaactactccggcacctacggcgtgaccacctccggcgacgccctgaccatccagttcgtgacccagagcaatgtgggcagccgcctgtacctgatggccaccgacaccacctaccaggagttcaccctgagcggcaacgagttcagcttcgacgtggacgtgtcccagctgccctgcggcctgaacggcgccctgtacttcgtgtcgatggatgctgacggcggcaagagcaagtacccgggcaacgccgctggcgccaagtacggcaccggctactgcgacagccagtgcccgagggacctgaagttcatcaacggccaggccaacgtggacggctggcaacccagcagcaacaacgccaacaccggcatcggcaaccacggcagctgctgctccgagatggacatctgggaggccaacagcatcagcgaggccctgaccccacacccatgcgaggatgtgggccagaccatgtgctccggcgacagctgcggtggcacctactccgacgacagatacggtggcacttgcgacccagacggctgcgactggaacccatacagactgggtaacacgagcttctacggcccaggcagcagcttcaccctggacaccaccaagaagctgaccgtcgtcacccagttcgccaccaacggcgccatcagccgctactacgtccagaacggcgtgaagttccagcagccgaacgcccaagtgggcagctactccggcaacaccatcaacgccgactactgcgctgccgagcagaccgccttcggcggcaccagcttcaccgacaagggcggcctggcccagatcaacaaggccttccagggcggcatggtgctggtgatgagcctgtgggacgactacgccgtgaacatgctgtggctggacagcacctacccggccaacgccacgggtacgccaggcgccaagaggggcagctgctccacctccagcggcgtgccagcccaggtggaggcccagagcccgaacagcaaggtggtgttcagcaacatccgcttcggcccgatcggcagcaccggcggcaacaccggcagcaacccgccaggcaccagcaccaccagggccccaccaagctccacgggcagcagcccaaccgccacccagacccactacggccaatgcggcggcactggctggggtggcccaaccatctgcgcctccggctacacctgccaggtgctgaacccgttctactcccagtgcctgtga

SEQ ID NO: 487 - DNA, 1467 bp, Artificial sequence
  dicot optimized SEQ ID NO:34
atgcaacaagtgtgcactcaacaagctgagactcatccaccacttacttggcaaaagtgcactgcttctggatgcactgctcagtctggatctgttgtgcttgatgccaattggaggtggactcacgataccaagtctaccaccaactgctacgatggaaacacttggtcatctaccctttgcccagatgatgctacttgcgctaagaactgctgccttgatggtgctaactactctggaacctacggtgttactacctctggtgatgctctcaccattcagttcgtgacccagtctaatgttggatctaggctctaccttatggctactgataccacctaccaagagttcaccctttctggaaacgagttctccttcgatgttgatgtgtctcaacttccatgcggacttaacggtgctctttacttcgtgtctatggatgctgatggtggcaagtctaagtatccaggaaatgctgctggcgctaagtatggaactggatactgcgattctcaatgcccaagggacctcaagttcattaacggacaggctaacgttgatggatggcagccatcttctaacaacgctaacaccggaattggaaaccacggatcttgctgctctgagatggatatttgggaggctaactccatttctgaggctcttactccacatccatgcgaggatgttggacaaactatgtgctctggtgattcttgcggaggaacctactctgatgatagatacggtggaacctgcgatccagatggatgtgattggaacccatacaggcttggaaacacctctttctacggaccaggatcttctttcaccctcgacaccactaagaagttgaccgttgttactcagttcgctaccaacggtgctatttccaggtactacgttcagaacggcgttaagttccaacaacctaacgctcaagtgggatcttactccggaaacaccatcaacgctgattattgcgctgctgaacaaactgctttcggaggaacctctttcactgataagggtggactcgctcagattaacaaggctttccagggtggaatggtgcttgttatgtccctctgggatgattacgctgtgaacatgctttggctcgattctacttacccagctaacgctactggaactccaggtgctaagagaggatcttgctctacttcttccggtgttccagctcaagttgaggctcagtctccaaactctaaggtggtgttcagtaacattagattcggaccaattggatctactggtggaaacaccggatctaacccaccaggaacttctactactagggctccaccatcttctactggatcttctccaactgctacccaaactcattacggacaatgcggaggaactggatggggaggaccaactatttgcgcttctggatacacctgccaagtgctcaacccattctactctcagtgcctttga

SEQ ID NO: 488 - DNA, 654 bp, Artificial sequence
  Cestrum yellow leaf curl virus promoter plus leader
gtttaattactggcagacaaagtggcagacatactgtcccacaaatgaagatggaatctgtaaaagaaaacgcgtgaaataatgcgtctgacaaaggttaggtcggctgcctttaatcaataccaaagtggtccctaccacgatggaaaaactgtgcagtcggtttggctttttctgacgaacaaataagattcgtggccgacaggtgggggtccaccatgtgaaggcatcttcagactccaataatggagcaatgacgtaagggcttacgaaataagtaagggtagtttgggaaatgtccactcacccgtcagtctataaatacttagcccctccctcattgttaagggagcaaaatctcagagagatagtcctagagagagaaagagagcaagtagcctagaagtagtcaaggcggcgaagtattcaggcaggtggccaggaagaagaaaagccaagacgacgaaaacaggtaagagctaagctttctcatctcaaagatgattcttgatgatttttgtctccaccgtccgtataggatcactgaattgataaatatcatatggtttgtataaaacccgatatttaaatctgtatcattctgtttgaataaaacttgatactttgttggagtcgtttgtaaaaacataaacc

SEQ ID NO: 489 - DNA, 1146 bp, Unknown
  Fungal DNA
atgcgctatctcctctcccttagtggcctcactggcctcgccctggcccagaacggagcctggcagcaatgcggaggcaaaaactggagcggctctacgacttgcatctctggttacacttgcagctttattaatgactattacagccagtgtgtgccaggctctaaccccaacccgccttctactactctctctactgtcacctcttctcccaccaacaaccccaacccaggaacgggcaagttcgtctgggtcggtaccaatgaggctggtggtgagtttggagagaacaatctgccaggcaccttgggcaaggattacaccttcccagacactgccgcgattgacactctgatcggtcaaggatacaacaccttccgtgtccagctcaagatggagaggctgacgagcaccttgactggtagccataaccaggcttaccttgatggctacagtaaggttatcaaccacatcacccagaagggtgcctatgccgtccttgatcctcacaactatggccgcttctttggtaatgtcattaccgacacttcagctttccagacttggtggaagaaccttgccgccgtcttcaagaacaacgaccgcgtcatctttgacaccaacaacgagtaccacagcatggaccagactcttgttctcaagctcaaccaggcagctatcgacggtatccgctccaccggtgccaagcagtacatctttgttgaaggcaaccagtggtctggtgcctggtcttggcctgatgtcaacgacaacatgaaagctcttaccgatcccgaggacaagattgtctaccagatgcaccagtacttggactctgacagctctggcacttctgaggcctgtgtttcctccaccattggtgttgaacgggtcaaggcagccacagcctggcttaagaagaacggcaaggtcggcattctcggtgagtttgccggtggagcaaacagccagtgcaaggcagccgtccagggtatgctcgactatcttgaggacaacagcgatgtctggaagggtgttctctggtgggcggctggtccctggtggggaacctacatgtacagctttgagcctccaagtggaactggctaccagtactacaactctcttctcaagagctacgtctaa

SEQ ID NO: 490 - protein, 381 aa, Unknown
  Fungal protein
  DOMAIN (20)...(48): Fungal cellulose binding domain
  DOMAIN (87)...(359): Cellulase (glycosyl hydrolase family 5)
  SITE (24)...(51): Cellulose-binding domain, fungal type. Prosite id = PS00562
  SITE (28)...(31): N-glycosylation site. Prosite id = PS00001
MRYLLSLSGLTGLALAQNGAWQQCGGKNWSGSTTCISGYTCSFINDYYSQCVPGSNPNPPSTTLSTVTSSPTNNPNPGTGKFVWVGTNEAGGEFGENNLPGTLGKDYTFPDTAAIDTLIGQGYNTFRVQLKMERLTSTLTGSHNQAYLDGYSKVINHITQKGAYAVLDPHNYGRFFGNVITDTSAFQTWWKNLAAVFKNNDRVIFDTNNEYHSMDQTLVLKLNQAAIDGIRSTGAKQYIFVEGNQWSGAWSWPDVNDNMKALTDPEDKIVYQMHQYLDSDSSGTSEACVSSTIGVERVKAATAWLKKNGKVGILGEFAGGANSQCKAAVQGMLDYLEDNSDVWKGVLWWAAGPWWGTYMYSFEPPSGTGYQYYNSLLKSYV

SEQ ID NO: 491 - DNA, 996 bp, Unknown
  Fungal DNA
atgaagtttcagagcactctgcttcttgccgccgcggctggttccgcgttggctgtgcctcatggtcctggacataagaagagggcgtctgtgtttgaatggttcggatcgaatgagtctggtgctgagtttgggaccaatattcctggggtttggggaaccgactacatcttccccgacccctcggccatctctacgttgattgacaaggggatgaacttcttccgcgtccagttcatgatggagaggttgctgcccgactcgatgactggctcatatgatgaggagtatctggccaatttgacgacagtgataaaagcggtaacggacggaggcgctcatgcccttgttgaccctcataactatggcagatacaacggcgagatcatctccagcacgtctgatttccagaccttctgggaaaatctggccggccagtacaaagataacgacctggtcatgtttgacactaacaacgaatatcacgacatggatcaggatctcgtgctgaacctcaaccaagcagccattaacggcatccgcgccgcaggtgcgaccagccagtacatcttcgtcgaaggcaactcctggaccggagcctggacgtgggtcgacgtcaatgacaacatgaagaatttgaccgaccccgaagacaagatcgtctatgaaatgcatcagtacctagactccgacggttccggcacctcggagacctgcgtgtccgagaccatcggaaaagagcgggtcactgaagctacacagtggctgaaggacaataagaaggtcggcttcataggcgaatatgccgggggttccaatgatgtatgtcggagtgccgtgtcggggatgctggagtacatggcgaataacaccgacgtatggaagggtgcgtcgtggtgggcagccgggccatggtggggagactacattttcagcctggagcccccagatggaactgcgtacacgggtatgctggatatcctggaggcgtatctt

SEQ ID NO: 492 - protein, 332 aa, Unknown
  Fungal protein
  SIGNAL (1)...(18)
  DOMAIN (37)...(310): Cellulase (glycosyl hydrolase family 5)
  SITE (38)...(41): N-glycosylation site. Prosite id = PS00001
  SITE (101)...(104): N-glycosylation site. Prosite id = PS00001
  SITE (197)...(200): N-glycosylation site. Prosite id = PS00001
  SITE (215)...(218): N-glycosylation site. Prosite id = PS00001
  SITE (293)...(296): N-glycosylation site. Prosite id = PS00001
MKFQSTLLLAAAAGSALAVPHGPGHKKRASVFEWFGSNESGAEFGTNIPGVWGTDYIFPDPSAISTLIDKGMNFFRVQFMMERLLPDSMTGSYDEEYLANLTTVIKAVTDGGAHALVDPHNYGRYNGEIISSTSDFQTFWENLAGQYKDNDLVMFDTNNEYHDMDQDLVLNLNQAAINGIRAAGATSQYIFVEGNSWTGAWTWVDVNDNMKNLTDPEDKIVYEMHQYLDSDGSGTSETCVSETIGKERVTEATQWLKDNKKVGFIGEYAGGSNDVCRSAVSGMLEYMANNTDVWKGASWWAAGPWWGDYIFSLEPPDGTAYTGMLDILEAYL

SEQ ID NO: 493 - DNA, 999 bp, Unknown
  Fungal DNA
atgaagtttcagagcactctgcttcttgccgccgcggctggttccgcgttggctgtgcctcatggtcctggacataagaagagggcgtctgtgtttgaatggttcggatcgaatgagtctggtgctgagtttgggaccaatattcctggggtttggggaaccgactacatcttccccgacccctcggccatctctacgttgattgacaaggggatgaacttcttccgcgtccagttcatgatggagaggttgctgcccgactcgatgactggctcatatgatgaggagtatctggccaatttgacgacagtgataaaagcggtaacggacggaggcgctcatgcccttgttgaccctcataactatggcagatacaacggcgagatcatctccagcacgtctgatttccagaccttctgggaaaatctggccggccagtacaaagataacgacctggtcatgtttgacactaacaacgaatatcacgacatggatcaggatctcgtgctgaacctcaaccaagcagccattaacggcatccgcgccgcaggtgcgaccagccagtacatcttcgtcgaaggcaactcctggaccggagcctggacgtgggtcgacgtcaatgacaacatgaagaatttgaccgaccccgaagacaagatcgtctatgaaatgcatcagtacctagactccgacggttccggcacctcggagacctgcgtgtccgagaccatcggaaaagagcgggtcactgaagctacacagtggctgaaggacaataagaaggtcggcttcataggcgaatatgccgggggttccaatgatgtatgtcggagtgccgtgtcggggatgctggagtacatggcgaataacaccgacgtatggaagggtgcgtcgtggtgggcagccgggccatggtggggagactacattttcagcctggagcccccagatggaactgcgtacacgggtatgctggatatcctggaggcgtatctttga

SEQ ID NO: 494 - protein, 332 aa, Unknown; identical to SEQ ID NO: 492
  Fungal protein
  SIGNAL (1)...(18)
  DOMAIN (37)...(310): Cellulase (glycosyl hydrolase family 5)
  SITE (38)...(41): N-glycosylation site. Prosite id = PS00001
  SITE (101)...(104): N-glycosylation site. Prosite id = PS00001
  SITE (197)...(200): N-glycosylation site. Prosite id = PS00001
  SITE (215)...(218): N-glycosylation site. Prosite id = PS00001
  SITE (293)...(296): N-glycosylation site. Prosite id = PS00001

SEQ ID NO: 495 - DNA, 999 bp, Unknown
  Fungal DNA
atgcttcttcagaatctgttcgccgcggcgactctggccgcagctgcgtttgcagctccatcggagaagcgccaggagaggaaattgaaatggtttggcatcaacgagtctggcgcagagttcggtgagaagaacttcaccggcgtgtatggcagggagtacatctggtacgacttcaagaccattgaccagttcattgggcagggcatgaacatgttccgtctgaacttcctcatggagcgtcttacccccaacaagcttaccggcccattcgatcgcctttatctcggcaacctcaccgagcaagtaaaatatatcaccagcaaaggcgcctacgcaatgatccaaccgcacaactacggccgcttctacggtgaaatcatcaccgacactgccggcttcaagacctggtggcaaaacgtcgcggctcaatacaaagacaataaccttgtcgtcttcgacactaacaacgaataccacgacatggaccaacaactcgtctttaacctcaaccaagcctcaatcgacggcatccgcgcagcaggcgctaagcaatacatcacacccgaaggcaattcatggtcgggagcctggacatgggtatcatccggcaacggcgcctcacttgtaaacctcaaagaccccgagaacaaactcatctaccaaatgcaccaatacctcgacagcgacggcagcggctcccacgaagaatgcgtctcagccaccattttccgcgagcgcctcatcgccgcaacaaagtggctcaaagacaacaagaagcagggtgttattggcgagtttgcggcgggcaacaatgcccagtgcaagtcagctgttaaggatggacttaagtatctgcaggagaataaggatgtttggtggggagctatttggtgggctgcgggcccttggtgggcgacatatatgtatagtatggagccaccaaatggcattgcttggacggcgtttctgcctgagattaagagttatttcatctag

SEQ ID NO: 496 - protein, 332 aa, Unknown
  Fungal protein
  SIGNAL (1)...(18)
  DOMAIN (34)...(309): Cellulase (glycosyl hydrolase family 5)
  SITE (35)...(38): N-glycosylation site. Prosite id = PS00001
  SITE (45)...(48): N-glycosylation site. Prosite id = PS00001
  SITE (99)...(102): N-glycosylation site. Prosite id = PS00001
MLLQNLFAAATLAAAAFAAPSEKRQERKLKWFGINESGAEFGEKNFTGVYGREYIWYDFKTIDQFIGQGMNMFRLNFLMERLTPNKLTGPFDRLYLGNLTEQVKYITSKGAYAMIQPHNYGRFYGEIITDTAGFKTWWQNVAAQYKDNNLVVFDTNNEYHDMDQQLVFNLNQASIDGIRAAGAKQYITPEGNSWSGAWTWVSSGNGASLVNLKDPENKLIYQMHQYLDSDGSGSHEECVSATIFRERLIAATKWLKDNKKQGVIGEFAAGNNAQCKSAVKDGLKYLQENKDVWWGAIWWAAGPWWATYMYSMEPPNGIAWTAFLPEIKSYFI

SEQ ID NO: 497 - DNA, 1200 bp, Unknown
  Fungal DNA
atgaagcttctcaccgtcgcagcccttaccggcggcgcccttgcccagtccggcgcctggggccagtgtggtggccagggatggagcggcgcaaccacctgtgttgctgggtacacttgcaccttttcgaacccgtggtactctcagtgcctccccggctctgctcctcctccccctgcctcgacctccagcgccaggccggccacgacctcgtcggccgcgacgaccctgcagacatcgacacgcaccaccacctccaccggcaccactccgaccaccgctccgggagccttcgagtggtacggcgtcaacgagtccggcggcgagtttggcgagggtaccctgcccggccaatggggcaagcacttcatattccccgacccgacggccgtctcgactctccgccgtgatggctacaatacgttccgtgtgcaattcaagatggagcgtctcacccagaccagcctgacaggctcctttgacgcggcgtacctcaagaacctgaccgactcggtcaaccacatcaccaacagcggcggcatcgcggtcctcgacccccacaactacggccgcttcttcggcaacgtcatcaccaacacggccgacttccgcacctggtggcgcaacgtggccacgcagttcgtgtccaacccccgcgttgtcttcgacaccaacaacgagtaccacaccatggaccagaccctcgttctccagctcaaccaggccgccattgacggtatccgtgccgcgggtgccacccagaccatcttcgtcgagggtaaccagtggtccggcgcctggagctggcccgacgtcaacgacaacatgaagaacctcgtcgatcccctcaacaagatcgtgtaccagatgcaccagtacctcgactcggactcgtccggcaccagcgtcaactgcgtctcgggcaccatcggccgtgagcgcctcatcgccgccaccaactggctgcgcgcgaacggcaaggtcggcatcctcggcgagttcgctggtggcgccaaccctacctgccgtaccgccatcaccggccttctcgaccacctgtccgccaacaaggatgtctggaggggcttcctgtggtgggccgcgggcccctggtgggacacttacatgtactccttcgagcctcccagtggcactggctacgtcaactacaactcgctgctcaagcagtacattccttaa

SEQ ID NO: 498 - protein, 399 aa, Unknown
  Fungal protein
  SIGNAL (1)...(15)
  DOMAIN (19)...(47): Fungal cellulose binding domain
  DOMAIN (103)...(376): Cellulase (glycosyl hydrolase family 5)
  SITE (23)...(50): Cellulose-binding domain, fungal type. Prosite id = PS00562
  SITE (105)...(108): N-glycosylation site. Prosite id = PS00001
  SITE (169)...(172): N-glycosylation site. Prosite id = PS00001
MKLLTVAALTGGALAQSGAWGQCGGQGWSGATTCVAGYTCTFSNPWYSQCLPGSAPPPPASTSSARPATTSSAATTLQTSTRTTTSTGTTPTTAPGAFEWYGVNESGGEFGEGTLPGQWGKHFIFPDPTAVSTLRRDGYNTFRVQFKMERLTQTSLTGSFDAAYLKNLTDSVNHITNSGGIAVLDPHNYGRFFGNVITNTADFRTWWRNVATQFVSNPRVVFDTNNEYHTMDQTLVLQLNQAAIDGIRAAGATQTIFVEGNQWSGAWSWPDVNDNMKNLVDPLNKIVYQMHQYLDSDSSGTSVNCVSGTIGRERLIAATNWLRANGKVGILGEFAGGANPTCRTAITGLLDHLSANKDVWRGFLWWAAGPWWDTYMYSFEPPSGTGYVNYNSLLKQYIP

SEQ ID NO: 499 - DNA, 1149 bp, Unknown
  Fungal DNA
atgaagtccctcttcgctctcagcctcttcgccggcctttcggtcgctcaaaacgcagcatgggcccaatgcggtggaaacggctggactggctcaaagacctgcgtctctggctacaagtgcaccgtcgttaatgagtggtacagccagtgtatccccggtactgctgaggaacctactaccaccctcaagactactactggtggtggtagcacacctactggtacacctggaaatggaaagtttctctgggttggtactaatgaggctggtggtgagtttggtgagggcagtttgcctggaacttggggaaaacactttatcttccctgatcccgctgccgttgataccctcatctctcagggctacaacgccttccgcgttcaactccgcatggaacgcacaaaccctagctccatgaccggaccctttgacaccgcttacctcaagaacctcaccacaatcgtggaccacatcaccggcaagggcgccaacgtcattctcgaccctcacaactacggccgctactttgacaagatcatcacttcaacctctgacttccagacctggtggaagaactttgctacccagttcaagagcaacagcaaagtcatcttcgacactaacaatgagtacaacaccatggatcagactcttgttctgaacttgaaccaggctgctatcaacggtattcgtgctgctggcgctacccagactatttttgttgagggtaaccagtggtccggtgcttggtcttggcccgatgtcaacgacaacatgaaggctctcaccgaccctcttgacaagatcgtgtacgaaatgcaccagtacctcgactctgacagctccggtacttcacctaactgtgtctccaccaccattggagtcgagcgcgtcaaggctgctactgagtggttgaggaagaacaagaagattggcatgatcggtgaactcgccggcggtcctaacgacacctgcaagactgctgtcaagaatatgctggactatcttaaggagaactctgatgtttggaagggtgttacctggtgggctgctggtccttggtgggctgactacatgttcagctttgagcctcccagcggtactggttatcagtactacaactctcttctcaagacttatatctaa

SEQ ID NO: 500 - protein, 382 aa, Unknown
  Fungal protein
  SIGNAL (1)...(19)
  DOMAIN (20)...(48): Fungal cellulose binding domain
  DOMAIN (87)...(360): Cellulase (glycosyl hydrolase family 5)
  SITE (24)...(51): Cellulose-binding domain, fungal type. Prosite id = PS00562
  SITE (153)...(156): N-glycosylation site. Prosite id = PS00001
  SITE (327)...(330): N-glycosylation site. Prosite id = PS00001
MKSLFALSLFAGLSVAQNAAWAQCGGNGWTGSKTCVSGYKCTVVNEWYSQCIPGTAEEPTTTLKTTTGGGSTPTGTPGNGKFLWVGTNEAGGEFGEGSLPGTWGKHFIFPDPAAVDTLISQGYNAFRVQLRMERTNPSSMTGPFDTAYLKNLTTIVDHITGKGANVILDPHNYGRYFDKIITSTSDFQTWWKNFATQFKSNSKVIFDTNNEYNTMDQTLVLNLNQAAINGIRAAGATQTIFVEGNQWSGAWSWPDVNDNMKALTDPLDKIVYEMHQYLDSDSSGTSPNCVSTTIGVERVKAATEWLRKNKKIGMIGELAGGPNDTCKTAVKNMLDYLKENSDVWKGVTWWAAGPWWADYMFSFEPPSGTGYQYYNSLLKTYI

SEQ ID NO: 501 - DNA, 1200 bp, Unknown
  Fungal DNA
atgcgcaaccttcttgctctcttcgccctcgccggcccagctctcgcccagagcggcgcttggggacaatgcggcggcaaggggtggactggcgccacgacctgcgtgagcggctacacttgcacgtaccaaaacgactactatagccagtgtctggccggctcggacaagtcttctactaccttgtcgactgtgaccaagtcggcgacttcctcgtcttcgaccaaggcttctgctacggtgaccaagacttctgccacggcgacagccactggagggtcgtccactagtcaatggtggttcggcgttaacgaggccggtggtgagtttggagagggaactctgcctggcacctggggcgtcaactacattttccccgatacttcggtcatcgatactttgatcggccaagggtacaacacgttccgcgtcggcttccgcatggagcggctcaccaccagctccctgacgggctccctcaacgaggcctatctcaagaacctcaccgccgtggtcaaccacatcaccgacaagggcgcctgggccgtcctggacccgcacaactacggccgctactttggcaacatcatcaccgacacggccgccttccagacgtggtggaagaacgtcgcgacgcagtttaagagcaacggccacgtcatcttcgacaccaacaacgagtacaacggcatggaccagacgctcgtcctcaacctcaaccaggccgccatcgacggcatccgcgccgccggggccaccagccagtacatctttgtcgagggcaaccagtggtcgggcgcgtggtcgtggaccgacgtcaacaccaacatgaaggcgctcaccgacacgcaggacaagatcgtctacgagatgcaccagtacctcgactcggacagctcgggcacgtcgtcgacttgtgtttcgacgacgattggcgtcgagcgcgtgaccaaggcgaccgagtggctgcgggcgaacggcaaggtcggcatcattggcgagtttgcgggcggcgcgaacacgcagtgccagacggctgtcaagggcttgttggactatctcaaggcgaacgacgatgtgtggatgggcgctctgtggtgggctggcggtccgtggtggagtgactacatcttcagctttgagccgccgagcggaactgggtactcgtactacaactctctcctgaagacgtatgcttga

SEQ ID NO: 502 - protein, 399 aa, Unknown
  Fungal protein
  SIGNAL (1)...(16)
  DOMAIN (20)...(48): Fungal cellulose binding domain
  DOMAIN (103)...(377): Cellulase (glycosyl hydrolase family 5)
  SITE (24)...(51): Cellulose-binding domain, fungal type. Prosite id = PS00562
  SITE (169)...(172): N-glycosylation site. Prosite id = PS00001
MRNLLALFALAGPALAQSGAWGQCGGKGWTGATTCVSGYTCTYQNDYYSQCLAGSDKSSTTLSTVTKSATSSSSTKASATVTKTSATATATGGSSTSQWWFGVNEAGGEFGEGTLPGTWGVNYIFPDTSVIDTLIGQGYNTFRVGFRMERLTTSSLTGSLNEAYLKNLTAVVNHITDKGAWAVLDPHNYGRYFGNIITDTAAFQTWWKNVATQFKSNGHVIFDTNNEYNGMDQTLVLNLNQAAIDGIRAAGATSQYIFVEGNQWSGAWSWTDVNTNMKALTDTQDKIVYEMHQYLDSDSSGTSSTCVSTTIGVERVTKATEWLRANGKVGIIGEFAGGANTQCQTAVKGLLDYLKANDDVWMGALWWAGGPWWSDYIFSFEPPSGTGYSYYNSLLKTYA

SEQ ID NO: 503 - DNA, 993 bp, Unknown
  Fungal DNA
atgcgatccgcactccttgtcgttgccggtgcgtctctggcattgtctgcatgcgcggacttcttgttcaccggctccaatgaatccggtgccgagtttggagagggcaatctccctggtactctcggcacggactacatctttccggaaaccgatgccattgatgtaagtgagtcgagaacactccttgatactgggatgaacactttccgcatcccattccgaatggagcgtctcgccccggactcaatgacagaggccctcaattcgacctacctcagcggcctcaagacggtcgtcaaccacattaccggccagggcgcctatgctgtactcgaccctcacaattatggtcgatacgccggcagcatcatcaccgacacagacgcctttgctagcttctggaaatcggttgctaccgagtttgtcgacaatgagctggtcattttcgacacgaataacgaataccacgacatggaaaactcgctggtggctgagttgaaccaggctgccattactgctatccgcaatgccggtgccacgtctcagtacatctttgtcgagggcaacgcgtattccggagcgtggacctgggtttccagcggcaacggtgactctctcgcagacttgaccgacccccaggataagatcatctacgagatgcaccagtacctcgactctgatggatcgggcacgtccgaaacttgcgtcaataccaccatcggtgcggagcgtctcaaggcggccactgcttggctcaaggagaatggcaagctcggcatcctgggcgagactgccggtgcggctaacgaggtgtgcaagactgccatccagggtgagcttcagtatctcaaggacaactcggacgtgtggactggctggttgtggtggtctgctggcccctggtggggtgactatatgttcagcatggagcctcccagtggtactgcctacacctactatcttgatacgatccaagagttcattgagtag

SEQ ID NO: 504 - protein, 330 aa, Unknown
  Fungal protein
  DOMAIN (26)...(307): Cellulase (glycosyl hydrolase family 5)
  SITE (27)...(30): N-glycosylation site. Prosite id = PS00001
  SITE (90)...(93): N-glycosylation site. Prosite id = PS00001
  SITE (241)...(244): N-glycosylation site. Prosite id = PS00001
MRSALLVVAGASLALSACADFLFTGSNESGAEFGEGNLPGTLGTDYIFPETDAIDVSESRTLLDTGMNTFRIPFRMERLAPDSMTEALNSTYLSGLKTVVNHITGQGAYAVLDPHNYGRYAGSIITDTDAFASFWKSVATEFVDNELVIFDTNNEYHDMENSLVAELNQAAITAIRNAGATSQYIFVEGNAYSGAWTWVSSGNGDSLADLTDPQDKIIYEMHQYLDSDGSGTSETCVNTTIGAERLKAATAWLKENGKLGILGETAGAANEVCKTAIQGELQYLKDNSDVWTGWLWWSAGPWWGDYMFSMEPPSGTAYTYYLDTIQEFIE

SEQ ID NO: 505 - DNA, 1230 bp, Unknown
  Fungal DNA
atgaagtcttccgtgctcgccggcattttcgccaccggcgccgccgcccagagcggtgcttggggccagtgtggtggcaacggctggtcgggcgccacgtcctgcatctcgggctaccgctgcgtgtaccagaacgactggtacagccagtgcttgcctggtgccgacacgaccaccgccaaggcgacgacgacgacgacgacttccaagctgaccaccaccacgccgtcgaccaccctcaagacctcgactaccagcaagacctcgaccacctcgtcggcgcctgccaccagctcctcggcttcctccagcaagaagttcaagtggttcggtatcaaccagtcctgcgccgagttcggccagggcacctaccccggcacatggggcaagcacttcaccttcccctcgacgtcgtcgatccagactcacatcaatgacggcttcaacgccttccgcgtggccttcgccatggagcggctggtgcccacccagctgacgggctcgttcgacgccgcctacctcaagaacctgaccgatacggtcaacttcattaccaacgccggctcgtatgccatcctggacccccacaacttcggccgctactacggcaacatcatcaccgacaaggccgcgttcggcagcttctggaccaaggtcgccacccagttcgcgtccaactcgcgcgtcgtcttcgataccaacaacgagtaccacgatatggaccagacgctcgtcttcgacctcaaccaggccgccatcaacgccatccgcgccgcgggtgccacctcgcagtatatcttcgtcgagggcaactcgtactcgggcgcctggacctggacccaagtcaacaccaacctgggcggcctgacagacccgcagggcaagatcgtctacgagatgcaccagtacctcgactcggacgggtcgggcaccagcgccacctgcgtcagctccgagatcggcctgcagcgcgtccaggacgcgaccaactggctgcgcgccaacggcaaggtcggcttcctcggcgagttcgccggcggcgccaactcggtctgccagaccgccgtcaccggcctgctcgaccacctcaaggccaacgccgacgtgtggacgggcgcgctctggtgggctggcggcccgtggtggggcgattacatcttcagcttcgagcctccttctggcacgggctacacctactacaactcgcttctcaagaagtacgttgtctaa

SEQ ID NO: 506 - protein, 409 aa, Unknown
  Fungal protein
  SIGNAL (1)...(16)
  DOMAIN (20)...(48): Fungal cellulose binding domain
  DOMAIN (114)...(386): Cellulase (glycosyl hydrolase family 5)
  SITE (24)...(51): Cellulose-binding domain, fungal type. Prosite id = PS00562
  SITE (114)...(117): N-glycosylation site. Prosite id = PS00001
  SITE (178)...(181): N-glycosylation site. Prosite id = PS00001
MKSSVLAGIFATGAAAQSGAWGQCGGNGWSGATSCISGYRCVYQNDWYSQCLPGADTTTAKATTTTTTSKLTTTTPSTTLKTSTTSKTSTTSSAPATSSSASSSKKFKWFGINQSCAEFGQGTYPGTWGKHFTFPSTSSIQTHINDGFNAFRVAFAMERLVPTQLTGSFDAAYLKNLTDTVNFITNAGSYAILDPHNFGRYYGNIITDKAAFGSFWTKVATQFASNSRVVFDTNNEYHDMDQTLVFDLNQAAINAIRAAGATSQYIFVEGNSYSGAWTWTQVNTNLGGLTDPQGKIVYEMHQYLDSDGSGTSATCVSSEIGLQRVQDATNWLRANGKVGFLGEFAGGANSVCQTAVTGLLDHLKANADVWTGALWWAGGPWWGDYIFSFEPPSGTGYTYYNSLLKKYVV

SEQ ID NO: 507 - DNA, 1023 bp, Unknown
  Fungal DNA
atgaagttcctcaacatcattctcggtgctgccgctgccggttcggccctggcggcgccagcctgtgatgccacggctcccaaggacaagcgggcgagcaagttcaagtttgtcggcgtcaaccagtcgggcgccgagtttggcaaaggcatgctgcctggccagctcggtaaagactatacctggccggtcaagtcgacgatcgatactctcgtcggcaagggaatgaacacgttccgcgtccccatcatgatggagcgcctcatccccaacaagatgaccggaagcatcgacgccgcctactctcaggggctcaccgatatcatctcgtacatcaccggcaagggcgcctacgcggttctcgacccccacaactttggccggtactacgaacaaatcatcaccgacgttgatggtttcaaggcctggtggacgaccacggccaagctctttgccagcaacagcaaggtcatcttcgacaccaacaacgagtaccacgacatggacaactcgctcgtgttccggctcaaccaggcggccatcgacggtatccgggccgcgggcgccacgtcgcagctgattttcatcgagggcaactcctggagcggcgcgtggacttgggtctcctccggcaacggcgcctcgctgctcaacctccaggaccccgcgggcgcggacaagctcgtgtacgagatgcaccagtacctcgactcggacgggtccggcacgtctgaggcgtgcgtgtcgagcaccatcgggcaggagcgcctgcgcgaggcgacggcgtggctcaaggccaacggcaagaaggccatcctgggcgagacggcgggcggcgccaacgcgcagtgcatcgcggcgctgacgggcatgctgggttacatggccaacaacgccgacgtgtggacgggctggctgtggtggggcggcggcccgtggtgggggacttatatgtactcgatggagccgccgagcggtgctgggtatcaacaagtcctgccgagcttgacgccgtacttttga

SEQ ID NO: 508 - protein, 340 aa, Unknown
  Fungal protein
  DOMAIN (40)...(318): Cellulase (glycosyl hydrolase family 5)
  SITE (41)...(44): N-glycosylation site. Prosite id = PS00001
MKFLNIILGAAAAGSALAAPACDATAPKDKRASKFKFVGVNQSGAEFGKGMLPGQLGKDYTWPVKSTIDTLVGKGMNTFRVPIMMERLIPNKMTGSIDAAYSQGLTDIISYITGKGAYAVLDPHNFGRYYEQIITDVDGFKAWWTTTAKLFASNSKVIFDTNNEYHDMDNSLVFRLNQAAIDGIRAAGATSQLIFIEGNSWSGAWTWVSSGNGASLLNLQDPAGADKLVYEMHQYLDSDGSGTSEACVSSTIGQERLREATAWLKANGKKAILGETAGGANAQCIAALTGMLGYMANNADVWTGWLWWGGGPWWGTYMYSMEPPSGAGYQQVLPSLTPYF

SEQ ID NO: 509 - DNA, 1224 bp, Unknown
  Fungal DNA
atgaagacttccgtcctcgccggcatcttcgccacgggcgccgctgcccagggcgggccttgggcccagtgtggtggtaacaacttctccgggcccaccacttgcgtgtctggctacacctgtgtgtaccagaacgactggtacagccagtgcctgcccggtgcggctgctccgacgacgaccactgccaagacgtcgacgaccaccaaggccacgacgaccaccacgtcgaccacgctgaagacatcaaccgtctccagcacgacctcgtccgcccccgccgccagcagctcggctgctaccaagggcaagctgaagtggtttggcatcaaccagtcctgcgccgagttcggccagggcacctaccccggcatttggggcaagcacttcaccttcccctcgacgtcgtcgatccagactcacatcaacgacggatacaacagcttccgcgtggccttcgccatggagcgcctgatccccaaccagctgacgggctcgtttgacgccgactacctcaagaacctgaccgagacggtcgacttcattaccaacaagggcgcgtatgctatcctagacccccacaactttggccggtactacggcaacatcatcaccgacaaggccgccttcggcagcttctggagcaaggtcgccacccagtacgcgtccaactcgcgcgtcatcttcgacaccaacaacgagtaccatgacatggaccagaacctcgtcttcgacctcaaccaggccgccatcaacgccatccgtgccgcgggcgccacctcgcagtacatcttcgtcgagggcaactcgtactcgggcgcgtggacctggaacacgaccaacaccaacctcggcgccctgaccgacccccagaacaagatcgtctacgagatgcaccagtacctcgacagcgacggctccggcaccagcgccacctgcgtcagcaccgagatcggtgtccagcgcgtcattggtgccaccaactggctccgcgccaacggcaaggttggcttcctcggcgagttcgccggcggtgccaactcggtctgccagactgccgtcaccggtctccttgagcacctcaaggccaacagcgacgtctggcagggtgccctctggtgggctggcggcccgtggtggggcgactacatctacagcttcgagcccccctccggcacgggctatacttactacaactctctcctgaagaagtatgttgcctaa

SEQ ID NO: 510 - protein, 407 aa, Unknown
  Fungal protein
  SIGNAL (1)...(16)
  DOMAIN (20)...(48): Fungal cellulose binding domain
  DOMAIN (112)...(384): Cellulase (glycosyl hydrolase family 5)
  SITE (24)...(51): Cellulose-binding domain, fungal type. Prosite id = PS00562
  SITE (28)...(31): N-glycosylation site. Prosite id = PS00001
  SITE (112)...(115): N-glycosylation site. Prosite id = PS00001
  SITE (176)...(179): N-glycosylation site. Prosite id = PS00001
  SITE (282)...(285): N-glycosylation site. Prosite id = PS00001
MKTSVLAGIFATGAAAQGGPWAQCGGNNFSGPTTCVSGYTCVYQNDWYSQCLPGAAAPTTTTAKTSTTTKATTTTTSTTLKTSTVSSTTSSAPAASSSAATKGKLKWFGINQSCAEFGQGTYPGIWGKHFTFPSTSSIQTHINDGYNSFRVAFAMERLIPNQLTGSFDADYLKNLTETVDFITNKGAYAILDPHNFGRYYGNIITDKAAFGSFWSKVATQYASNSRVIFDTNNEYHDMDQNLVFDLNQAAINAIRAAGATSQYIFVEGNSYSGAWTWNTTNTNLGALTDPQNKIVYEMHQYLDSDGSGTSATCVSTEIGVQRVIGATNWLRANGKVGFLGEFAGGANSVCQTAVTGLLEHLKANSDVWQGALWWAGGPWWGDYIYSFEPPSGTGYTYYNSLLKKYVA

SEQ ID NO: 511 - DNA, 1233 bp, Unknown
  Fungal DNA
atgaagactctctcccttgtagctgtcctgctcgttcaagcctggactgcgagtagcagtccgagggcgaagcggtcttcgggctttcaatggtttggtagcaatgagtccggcgctgaattcggctccgggaatatccccggtactttgggcacggattacatctggcctgatgcgacggccatcgagacgctgcatagtgcagggatgaatatcttccgcgtgccgtttctcatggagcggttggtgccgaatgagttgactggtgcggcggatgcgacctatatggctgatttgaaggctacggtgcaaaccattacagatctgggtgcttatgcggtggtggatccgcataattttgggagatactacggcagcatcatcacctcgaccagcgacttcgcagccttctggaccaccgtagccagcgagttcaccgacaatgaccgggtcatcttcgataccaacaacgagtttcacgacgaagaccaaaccctcgtcctgaacctcaaccaggctgccatcacggcgatccgcgccaccggcgccaccacgcaatacatcttcgtcgaaggcaactcctacacgggcgcctggacctggaccaccaccaacacgaacctcgtcaacctgaccgaccccaacgaccatctcatctacgaaatgcaccagtacctggacagcgatggctccgggacgagttcgacgtgcgtcagctcgacgatcggtgcggagcgcattgctgatgccacgagctggttgagggagaatgggaagcaggcggtgttgggagagttcgcgggcggcgcgaacagtgtatgtgaggaggcggttacgggcatgttggatgcgatggtcgatgcgagtgatgtttggttgggaggtatgtggtggtctgctggaccgtggtggggggattatatcttttcgttggagccggatgatggcattgcgtatgagtattatttgagcgtgttggaggggtatactcctggttcatcctcttctgggtcttctactacgagtgcagtgacgagtgccagtagtacgtctgctgctgggagtgctactacgagcaaggtgactactaccactgctgctgctactgctacatcgacggctgtggctgcgcattatgcgcagtgtggtgggcagggatggactggggcgacgacttgtgcggatggatatacctgtacggtggagaatgcgtggtattcgcagtgtttgtag

SEQ ID NO: 512 - protein, 410 aa, Unknown
  Fungal protein
  DOMAIN (34)...(308): Cellulase (glycosyl hydrolase family 5)
  DOMAIN (378)...(406): Fungal cellulose binding domain
  SITE (35)...(38): N-glycosylation site. Prosite id = PS00001
  SITE (213)...(216): N-glycosylation site. Prosite id = PS00001
MKTLSLVAVLLVQAWTASSSPRAKRSSGFQWFGSNESGAEFGSGNIPGTLGTDYIWPDATAIETLHSAGMNIFRVPFLMERLVPNELTGAADATYMADLKATVQTITDLGAYAVVDPHNFGRYYGSIITSTSDFAAFWTTVASEFTDNDRVIFDTNNEFHDEDQTLVLNLNQAAITAIRATGATTQYIFVEGNSYTGAWTWTTTNTNLVNLTDPNDHLIYEMHQYLDSDGSGTSSTCVSSTIGAERIADATSWLRENGKQAVLGEFAGGANSVCEEAVTGMLDAMVDASDVWLGGMWWSAGPWWGDYIFSLEPDDGIAYEYYLSVLEGYTPGSSSSGSSTTSAVTSASSTSAAGSATTSKVTTTTAAATATSTAVAAHYAQCGGQGWTGATTCADGYTCTVENAWYSQCL

SEQ ID NO: 513 - DNA, 1149 bp, Unknown
  Fungal DNA
atgaagtccctcttcgctctcagcctcttcgccggcctttcggtcgctcaaaacgcagcatgggcccaatgcggtggaaacggctggactggctcaaagacctgcgtctctggctacaagtgcaccgtcgttaatgagtggtacagccagtgtatccccggtactgctgaggaacctactaccaccctcaagactactactggtggtggtagcacacctactggtacacctggaaatggaaagtttctctgggttggtactaatgaggctggtggtgagtttggtgagggcagtttgcctggaacttggggaaaacactttatcttccctgatcccgctgccgttgataccctcatctctcagggctacaacgccttccgcgttcaactccgcatggaacgcacaaaccctagctccatgaccggaccctttgacaccgcttacctcaagaacctcaccacaatcgtggaccacatcaccggcaagggcgccaacgtcattctcgaccctcacaactacggccgctactttgacaagatcatcacctcaacctctgacttccagacctggtggaagaactttgctacccagttcaagagcaacagcaaagtcatctttgacactaacaatgagtacaacaccatggatcagactcttgttctgaacttgaaccaggctgctatcaacggtattcgtgctgctggcgctacccagactatctttgttgagggtaaccagtggtccggtgcttggtcttggcccgatgtcaatgacaacatgaaggctctcaccgaccctcttgacaagatcgtgtacgaaatgcaccagtacctcgactctgacagctccggtacttcacctaactgtgtctccaccaccattggagtcgagcgcgtcaaggctgctactgagtggttgaggaagaacaagaagattggcatgatcggtgaactcgccggcggtcctaacgacacctgcaagactgctgtcaagaatatgctggactatcttaaggagaactctgatgtttggaagggtgttacctggtgggctgctggtccttggtgggctgactacatgttcagctttgagcctcccagcggtactggttatcagtactacaactcccttctcaagacttatatctaa

SEQ ID NO: 514 - protein, 382 aa, Unknown; identical to SEQ ID NO: 500
  Fungal protein
  SIGNAL (1)...(19)
  DOMAIN (20)...(48): Fungal cellulose binding domain
  DOMAIN (87)...(360): Cellulase (glycosyl hydrolase family 5)
  SITE (24)...(51): Cellulose-binding domain, fungal type. Prosite id = PS00562
  SITE (153)...(156): N-glycosylation site. Prosite id = PS00001
  SITE (327)...(330): N-glycosylation site. Prosite id = PS00001

SEQ ID NO: 515 - DNA, 1365 bp, Clostridium thermocellum
gtgaaaaaaattgtttctttggtttgtgtgcttgtgatgctggtaagcatcttaggctcgttttcagtcgtagcggcatcaccggtaaaaggctttcaggtatcgggaacaaagcttttggatgcaagcggaaacgagcttgtaatgaggggcatgcgtgatatttcagcaatagatttggttaaagaaataaaaatcggatggaatttgggaaatactttggatgctcctacagagactgcctggggaaatccaaggacaaccaaggcaatgatagaaaaggtaagggaaatgggctttaatgccgtcagagtgcctgttacctgggatacgcacatcggacctgctccggactataaaattgacgaagcatggctgaacagagttgaggaagtggtaaactatgttcttgactgcggtatgtacgcgatcataaatgttcaccatgacaatacatggattatacctacatatgccaatgagcaaaggagtaaagaaaaacttgtaaaagtttgggaacaaatagcaacccgttttaaagattatgacgaccatttgttgtttgagacaatgaacgaaccgagagaagtaggttcacctatggaatggatgggcggaacgtatgaaaaccgagatgtgataaacagatttaatttggcggttgttaataccatcagagcaagcggcggaaataacgataaaagattcatactggttccgaccaatgcggcaaccggcctggatgttgcattaaacgaccttgtcattccgaacaatgacagcagagtcatagtatccatacatgcttattcaccgtatttctttgctatggatgtcaacggaacttcatattggggaagtgactatgacaaggcttctcttacaagtgaacttgatgctatttacaacagatttgtgaaaaacggaagggctgtaattatcggagaattcggaaccattgacaagaacaacctgtcttcaagggtggctcatgccgagcactatgcaagagaagcagtttcaagaggaattgctgttttctggtgggataacggctattacaatccgggtgatgcagagacttatgcattgctgaacagaaaaactctctcatggtattatcctgaaattgtccaggctcttatgagaggtgccggcgttgaacctttagtttcaccgactcctacacctacattaatgccgaccccctcgcccacggtgacagcaaatattttgtacggtgacgtaaacggggacggaaaaataaattctacagactgtacaatgctaaagagatatattttgcgtggcatagaagaattcccaagtcctagcggaattatagccgctgacgtaaatgcggat

SEQ ID NO: 516 - protein, 455 aa, Clostridium thermocellum
  SIGNAL (1)...(25)
  DOMAIN (72)...(359): Cellulase (glycosyl hydrolase family 5)
  DOMAIN (415)...(435): Dockerin type I repeat
  SITE (188)...(197): Glycosyl hydrolases family 5 signature. Prosite id = PS00659
  SITE (284)...(287): N-glycosylation site. Prosite id = PS00001
  SITE (421)...(440): Clostridium cellulosome enzymes repeated domain signature. Prosite id = PS00448
  SITE (429)...(432): N-glycosylation site. Prosite id = PS00001
MKKIVSLVCVLVMLVSILGSFSVVAASPVKGFQVSGTKLLDASGNELVMRGMRDISAIDLVKEIKIGWNLGNTLDAPTETAWGNPRTTKAMIEKVREMGFNAVRVPVTWDTHIGPAPDYKIDEAWLNRVEEVVNYVLDCGMYAIINVHHDNTWIIPTYANEQRSKEKLVKVWEQIATRFKDYDDHLLFETMNEPREVGSPMEWMGGTYENRDVINRFNLAVVNTIRASGGNNDKRFILVPTNAATGLDVALNDLVIPNNDSRVIVSIHAYSPYFFAMDVNGTSYWGSDYDKASLTSELDAIYNRFVKNGRAVIIGEFGTIDKNNLSSRVAHAEHYAREAVSRGIAVFWWDNGYYNPGDAETYALLNRKTLSWYYPEIVQALMRGAGVEPLVSPTPTPTLMPTPSPTVTANILYGDVNGDGKINSTDCTMLKRYILRGIEEFPSPSGIIAADVNAD

SEQ ID NO: 517 - DNA, 1233 bp, Unknown; identical to SEQ ID NO: 511
  Fungal DNA

SEQ ID NO: 518 - protein, 410 aa, Unknown; identical to SEQ ID NO: 512
  Fungal protein
  DOMAIN (34)...(308): Cellulase (glycosyl hydrolase family 5)
  DOMAIN (378)...(406): Fungal cellulose binding domain
  SITE (35)...(38): N-glycosylation site. Prosite id = PS00001
  SITE (213)...(216): N-glycosylation site. Prosite id = PS00001

SEQ ID NO: 519 - DNA, 1260 bp, Unknown
  Fungal DNA
atgagatacgatctgctgctcgcagccagcgctgcgctggctcttgcagggcctcaaggccactccaagcgggcctcatcctttgtttggtttggtgctagtgagtcctgtgccgagtttggcagccagcatattccgggtgttctgggaaccgactacacctggccggacacttcggccattcaaacgctccgcaatgcgggcatgaacatctttcgggtgccgttcatgatggagcgattgattcccaataccctgacctcgagtccgaatgcggcctatctgcaaggcctcaagagtacggtggacttcatcacgggtaccggcgcgtatgcgattgttgacccgcacaactttgggcgatactatggcaacatcatcaactccacaagtgactttgccgcgttctggacgaccgtggcctcgcagtttgcatcgaatgacaaggtcatcttcgacacgaacaacgaattcaacaccgaggaccaaactctggttctgaacctcaaccaggcggccattaacgccatccgagctgccggagccacctcgcagtacattttcgtggaaggaaactcgtggagtggtgcctggacgtggacgaccgtcaacagcaacctggtcagcttgacagacccccagaacaagatcgtctacgagatgcaccagtatctcgactccgatggttctggcacatccgacatctgcgtcagcacgaccattggccaggagcgtgtccaggctgccacacagtggctgcaaagcaatggcaaactcggattcttgggcgagttcgccggtggtgccaactcggtctgccagagtgccatcaccggaatgctgagctacatggagcagaacagcgatgtctggctcggcgcctcctggtgggccgccggcccatggtggagtacttacttcgcttcgatggagccgccatcgggcattgggtatacttactacctcagcattttgtctgcctacttccctggcagctcgggcggcactacaagcacttccacgacctcgcacgctacatcgacgactactaccaccacaacgaagcagactacatcggctaccacgaccacgaccacaaaatctacaactaccactacgaccactagcgcaggatctactgctactggaacggcagcccactggggacagtgcggtggcattggctggaccgggccgacgacttgtgctagcccgtatacctgccaggtacagaatgcgtggtactcgcagtgtttgtaa

SEQ ID NO: 520 - protein, 419 aa, Unknown
  Fungal protein
  SIGNAL (1)...(16)
  DOMAIN (35)...(307): Cellulase (glycosyl hydrolase family 5)
  DOMAIN (387)...(415): Fungal cellulose binding domain
  SITE (129)...(132): N-glycosylation site. Prosite id = PS00001
  SITE (390)...(401): Aldehyde dehydrogenases cysteine active site. Prosite id = PS00070
  SITE (397)...(424): Cellulose-binding domain, fungal type. Prosite id = PS00562
MRYDLLLAASAALALAGPQGHSKRASSFVWFGASESCAEFGSQHIPGVLGTDYTWPDTSAIQTLRNAGMNIFRVPFMMERLIPNTLTSSPNAAYLQGLKSTVDFITGTGAYAIVDPHNFGRYYGNIINSTSDFAAFWTTVASQFASNDKVIFDTNNEFNTEDQTLVLNLNQAAINAIRAAGATSQYIFVEGNSWSGAWTWTTVNSNLVSLTDPQNKIVYEMHQYLDSDGSGTSDICVSTTIGQERVQAATQWLQSNGKLGFLGEFAGGANSVCQSAITGMLSYMEQNSDVWLGASWWAAGPWWSTYFASMEPPSGIGYTYYLSILSAYFPGSSGGTTSTSTTSHATSTTTTTTTKQTTSATTTTTTKSTTTTTTTSAGSTATGTAAHWGQCGGIGWTGPTTCASPYTCQVQNAWYSQCL

SEQ ID NO: 521 - DNA, 1413 bp, Unknown
  Fungal DNA
atgcgctatacatggtcggtcgcggcggcgctgctgccatgcgcaatccaggctcagcaaaccctctatggacaatgtggtggtcagggctactccggactcaccagctgcgtggcgggagcaacatgctccaccgtaaatgaatactacgctcagtgtacgccagcagcaggcagcgccacttccaccaccttgaagacaactacgaccaccgctggggcgacgacgacgacgactagcaagacttctgcttcccagacgtctactactaaaacctcaaccagtaccgcctcaacaaccacggctacaaccacggccagcgcgagcggcaacccgttcagtgggtaccagctctacgtgaacccctactactcctccgaagtggcctccctggctatcccatccctcacggggacactttcctcgctccaggctgcagccacagccgcagccaaggtgccctctttcgtctggctggacgtggctgccaaggtgccgacgatggccacctacctggccgacatcaaagcccagaatgcagcgggagccaacccccccgtcgccggccagtttgtggtctacgacctccctgaccgcgactgcgccgcgctggccagcaacggcgagtactccatcgccaacaacggtgtggccaactacaaggcctacatcgactccatccgcaaggtcctggtgcagtactcggatgtgcacaccattctggtgatcgagcccgacagtctcgccaacctggtgaccaacctcaatgtggccaaatgtgccaacgctcagagcgcctacctcgaatgcaccaactatgccctggagcagctgaacctccccaacgtggccatgtatcttgatgccggacacgccggctggctcggctggcccgcgaaccagcaaccggccgccaatctgtacgcgagcgtgtacaagaacgccagctcgcccgccgcagtgcgcggcctggccacgaacgtcgccaactacaacgccttcaccatcgcctcgtgcccgtcgtacacccagggcaacagcgtctgcgacgagcagcagtacatcaacgcgatcgccccgctcctgtcagcgcagggcttcaacgcccacttcatcgtcgacaccggccgcaacggcaaacagcccaccggccaacaagcctggggcgactggtgcaacgtcatcaacacggggttcggcgtgcgcccgaccaccaacacgggcgacgcgctcgtcgacgccttcgtctgggtcaagcccggcggcgagagcgacggcacctccgatagctcggcgacccgctacgacgcccactgcgggtacagcgatgccttgcagccggcgccggaggcggggacctggttccaggcctacttcgtacaattgctctcgaacgccaatccggctttctag

SEQ ID NO: 522 - protein, 470 aa, Unknown
  Fungal protein
  SIGNAL (1)...(18)
  DOMAIN (22)...(50): Fungal cellulose binding domain
  DOMAIN (120)...(437): Glycosyl hydrolases family 6
  SITE (26)...(53): Cellulose-binding domain, fungal type. Prosite id = PS00562
  SITE (243)...(252): Glycosyl hydrolases family 6 signature 2. Prosite id = PS00656
  SITE (318)...(321): N-glycosylation site. Prosite id = PS00001
MRYTWSVAAALLPCAIQAQQTLYGQCGGQGYSGLTSCVAGATCSTVNEYYAQCTPAAGSATSTTLKTTTTTAGATTTTTSKTSASQTSTTKTSTSTASTTTATTTASASGNPFSGYQLYVNPYYSSEVASLAIPSLTGTLSSLQAAATAAAKVPSFVWLDVAAKVPTMATYLADIKAQNAAGANPPVAGQFVVYDLPDRDCAALASNGEYSIANNGVANYKAYIDSIRKVLVQYSDVHTILVIEPDSLANLVTNLNVAKCANAQSAYLECTNYALEQLNLPNVAMYLDAGHAGWLGWPANQQPAANLYASVYKNASSPAAVRGLATNVANYNAFTIASCPSYTQGNSVCDEQQYINAIAPLLSAQGFNAHFIVDTGRNGKQPTGQQAWGDWCNVINTGFGVRPTTNTGDALVDAFVWVKPGGESDGTSDSSATRYDAHCGYSDALQPAPEAGTWFQAYFVQLLSNANPAF

SEQ ID NO: 523 - DNA, 1569 bp, Unknown
  Fungal DNA
atgtccctcctgctcacggcactgtccctcgtcgcggcagccaaggctcagcaagtctgcaccctcacgacggagacacacccacctctgtcgtggtccaaatgcacctcgtcgggctgcaccacgacgcagggctctgttgtcgtcgacgccaactggcgctggactcatctcaccagctcgtcgacaaactgctacacgggcaacaaatgggacacgtccatctgcacgtcgggggccacgtgcgcggcgcaatgctgcgtcgacggcgccgactatgccggcacgtacggcgtcacaacgtcgggcaaccagctcaacatcaagtttgtcaccaacgggccctacagcaagaacattggcagtcggctgtacctgatgcaggacgacaccaactaccagatgttcacgctgctgggcaacgagttcagcttcgacgttgacgtgtccaagattagctgtgggcttaacggcgccctgtactttgtgtcgatggaccaggacggcggcatgtccaagtacagcggcaacaaggccggtgccaagtacggcacgggatactgcgacagccagtgcccgcgagacgtcaagtttatcaatggcgtggccaactcggacggttggcagccatcggccaacgacgccaacgctggcatcggcaacctgggcacctgctgcgccgaaatggacatctgggaagccaacgacatctcggccgcctacaccccccatccgtgcaccaccatcggccagcactcgtgcactggcgacagctgcggcggcacctactcctcggaccgatacggcggcgattgcgaccccgacggctgcgacttcaacagctaccgccagggcaacaccaccttctacggccccggctccggcttcaccctcgacaccacccagaagctcaccgtcgtcacccagttcctcaagggctccgacggcaacctctccgagattaagcgcttctacgtccagaacggcaaggtcgtccccaactcccagagcgacatctctggcgtctcgggcaactcggtcacccaggcctactgcgacgcccaaaagtccgtctttggcgacaaggactcgttcaatgcaaagggcggcttggcacagatgggcaaggcggtcgctcagcccatggttctggtcatgagcctctgggacgaccactactccaacatgctctggctcgactctacctatcccacaaactccaccgctctgggcaccaaacgcggcagctgtgccaccacctctggcgtcccctccgacattgagaactcagcggccgactctaccgtcgtcttctccaacatcaagttcggcgccatcaactccacctttactggctctgggaacacgggcggcggtagcaccaccaccaaagccagcagcaccaccaccagcatcaagaccagcaccagctccagctctggcagcactgccacgggaaccgctcctcactggggtcagtgtggtggcatcggctggactggtcctaccgtctgcgctgccggatatacttgcacttacaacaatgcctactactctcagtgcttgtaa

SEQ ID NO: 524 - protein, 522 aa, Unknown
  Fungal protein
  DOMAIN (18)...(452): Glycosyl hydrolase family 7
  DOMAIN (490)...(518): Fungal cellulose binding domain
  SITE (290)...(293): N-glycosylation site. Prosite id = PS00001
  SITE (321)...(324): N-glycosylation site. Prosite id = PS00001
  SITE (412)...(415): N-glycosylation site. Prosite id = PS00001
  SITE (453)...(456): N-glycosylation site. Prosite id = PS00001
  SITE (461)...(464): N-glycosylation site. Prosite id = PS00001
MSLLLTALSLVAAAKAQQVCTLTTETHPPLSWSKCTSSGCTTTQGSVVVDANWRWTHLTSSSTNCYTGNKWDTSICTSGATCAAQCCVDGADYAGTYGVTTSGNQLNIKFVTNGPYSKNIGSRLYLMQDDTNYQMFTLLGNEFSFDVDVSKISCGLNGALYFVSMDQDGGMSKYSGNKAGAKYGTGYCDSQCPRDVKFINGVANSDGWQPSANDANAGIGNLGTCCAEMDIWEANDISAAYTPHPCTTIGQHSCTGDSCGGTYSSDRYGGDCDPDGCDFNSYRQGNTTFYGPGSGFTLDTTQKLTVVTQFLKGSDGNLSEIKRFYVQNGKVVPNSQSDISGVSGNSVTQAYCDAQKSVFGDKDSFNAKGGLAQMGKAVAQPMVLVMSLWDDHYSNMLWLDSTYPTNSTALGTKRGSCATTSGVPSDIENSAADSTVVFSNIKFGAINSTFTGSGNTGGGSTTTKASSTTTSIKTSTSSSSGSTATGTAPHWGQCGGIGWTGPTVCAAGYTCTYNNAYYSQCL

SEQ ID NO: 525 - DNA, 2481 bp, Unknown
  Obtained from environmental sample
atggcattgtccaccgtttcaaaagtcatgctgctgacctgtgcagcggtcctgctgaccataccgggatgtaactccgccatggagcagccggaaaaatggccgtatgaggacgtttccgtcacgccggagagctggccgcagctgacggtggcggcgctcgacccggcgatcgaggcgcagattgatgcgatcctgccgaagctgacactggagcagaaggtcgggcaggtgatccagggcgacagcgaattcctgacgccggacgatgtgaaacgataccggttgggatcggtgttgagcggcgggaactcggcgccgggcgagcagccgtttgcggatgcggcgacctggctggcggcggcggatgcgtatttcgaagcatcgctggataccgagggcgtagagatcgccattccggtgatctgggggattgatgccgtacacggacatacgaaccttgtcggcgcgaccgtgtttccgcacaatgtcggccttggcgcgacgaatgatccggagctgatccgggatattgcggcggtgacggcggcagagctggttgtgtccggccatgactggacgttcgccccgacactggccgtgccgcgcgatgaccggtggggccgggcgtatgaaggtttctcggaagacccggaaattgtgcgcaattttgccggaaaggtggtcgaggggctgcagggcgtgcagggcgcggaaggctggctgcgcgaggggcgcgtgatctcgagtgcgaagcatttcgttgccgatggcggcacggagaatggccgcgaccagggcgatgcgcgcatcagcgaagcagagctgcgcgacattcatgcagcgggctatatgccggcaattgagtccggtgtgcagacgatcatggcttctttctccagctggaacggcatcaagatccatggcagccatgctctgctcacggacgttctcaaggatcggctcgggtttaccgggttcattgtcggcgactggaatgcgcatgggcagattccgggatgtacgaacacggattgtccgcaggcactgctggcggggatcgacatgtacatggcgccggacagctggaaggggatgtatgagtcgacgctgaagcatgttcaggacggcaccattccgatggagcggctggatgatgccgtgcggcgcatcctgcgtgtgaagattgcctatggcctgttcgacaagccgaagccgagtctgcgggcgggcgcgggagacacttcgctgctcggctcggcggcgcaccgggatgtggcgcggcgggctgtgcgccagtcgatggtgctgctcaagaacaatgacggcacgctgccgctggcggcgaagcagacggtgctggttgtgggcgacggggccgacagtatcagcaaggtgtcgggcggctggacgctgtcctggcagggcggcgggtatgacaatgcgcattttcccaacgggcagtcgatcctgtcgggcatccgcgaggtggtcgaagcggcaggcggcaccgtgatccacgatccggcgggcacgagcggggccagggcggatgtggtgatcgcggtatacggtgaagatccgtatgcagagttccagggcgaccgggacaatgtggactttgtgccggagggctttgatacggggctgctggcagggtaccgggcaaagggcgcgaaggtggtgtcgttgttcctgtcgggccggcctctgtggaccaacccggaaatcaatgcgtcggatgcgttcgtggccgcgtggtggccaggctctgaaggcggcggcgtggcggacctcttgttccggacgaagccggaatatgacttcacggggcggctttccttctcctggccggcgagcgcggtgcagacgccgctgaaccggggcgacgcgaattatgcaccgcaatttgcctatggttatgggctttcctatgccgcgccgcaggtggtgggtgtactgacggaagagtccgggctggcggcggatgcaaacggcgctcgcggcgcggtgtttgtgcgcgggcaggcggtggcaccgtggagcatgcggttcgaggggtcggacggcccgcccgcgcgggtggatcatggggcgcaggaagatgcgctggcgctttcggcgaacagtgcgccggcgtcgctctccttcgagacggcgggcgccgggcttgactggtcgcgggagtcgaacggggcgatggaactcagcttctttgcgcgctcgatgacggcggagccggcgagcgtgaacgtgtcgatgggatgcgcgctcgagggggcttgtgcgcggcaggtgccggtggcggtcggcgccgagtgggcggagcaccggatttcgctcagctgttttgcggatgccggtgtcgacatgtcaaagctgacgagcgcggttcgcttcgggctggacggcgggcgtgtggcgtttgccggcattgcgctcgccgaggacaaggacggccagccgaactgcggcggctga

SEQ ID NO: 526 - protein, 826 aa, Unknown
  Obtained from environmental sample
  DOMAIN (132)...(359): Glycosyl hydrolase family 3 N terminal domain
  DOMAIN (435)...(647): Glycosyl hydrolase family 3 C terminal domain
  SITE (586)...(589): N-glycosylation site. Prosite id = PS00001
  SITE (762)...(765): N-glycosylation site. Prosite id = PS00001
MALSTVSKVMLLTCAAVLLTIPGCNSAMEQPEKWPYEDVSVTPESWPQLTVAALDPAIEAQIDAILPKLTLEQKVGQVIQGDSEFLTPDDVKRYRLGSVLSGGNSAPGEQPFADAATWLAAADAYFEASLDTEGVEIAIPVIWGIDAVHGHTNLVGATVFPHNVGLGATNDPELIRDIAAVTAAELVVSGHDWTFAPTLAVPRDDRWGRAYEGFSEDPEIVRNFAGKVVEGLQGVQGAEGWLREGRVISSAKHFVADGGTENGRDQGDARISEAELRDIHAAGYMPAIESGVQTIMASFSSWNGIKIHGSHALLTDVLKDRLGFTGFIVGDWNAHGQIPGCTNTDCPQALLAGIDMYMAPDSWKGMYESTLKHVQDGTIPMERLDDAVRRILRVKIAYGLFDKPKPSLRAGAGDTSLLGSAAHRDVARRAVRQSMVLLKNNDGTLPLAAKQTVLVVGDGADSISKVSGGWTLSWQGGGYDNAHFPNGQSILSGIREVVEAAGGTVIHDPAGTSGARADVVIAVYGEDPYAEFQGDRDNVDFVPEGFDTGLLAGYRAKGAKVVSLFLSGRPLWTNPEINASDAFVAAWWPGSEGGGVADLLFRTKPEYDFTGRLSFSWPASAVQTPLNRGDANYAPQFAYGYGLSYAAPQVVGVLTEESGLAADANGARGAVFVRGQAVAPWSMRFEGSDGPPARVDHGAQEDALALSANSAPASLSFETAGAGLDWSRESNGAMELSFFARSMTAEPASVNVSMGCALEGACARQVPVAVGAEWAEHRISLSCFADAGVDMSKLTSAVRFGLDGGRVAFAGIALAEDKDGQPNCGG

SEQ ID NO: 527 - DNA, 1725 bp, Unknown
  Obtained from environmental sample
atgctgaaattaagtgataacctaactttcttgaaaagcaaaccattttttcttaatgaaaaagaaatgaagtgggtggagaaaacacttcaatccatgtccttacatgaaaaagtagggcaattattttgtcccattggcggttcagataataaacaagaattagaagcctttattaaggaatatcatcctggcggcatcatgtaccgtcctaatacaggagcaaaaatacaggaaacacatcggttgttacaagagctatccccggtacctttattaatttctgctaacttagaggccggtggtaatgggattgctacggatggtacttacttcggaaagcaaatgcaggtggctgcaacagataatgaagaaatggcctataaattaggattagttgctggccgtgaaggccgtgtggccggttgtaactgggcttttgcaccaattgttgatattgatatgaactatcgaaacccaattacaaacgtaagaacgtatgggtctgacccaattagagttgcccaaatgtctaaagcttttatgaagggaattcatgaaagcggactcgcagcagctgttaagcatttcccaggggatggagtggatgatagagatcagcatcttttatcatctgtaaacaccttatctaccgaagaatgggatcaaacctttgggatggtttatcaagaaatgatagacagtggggcaaaatcgattatggcgggccatatcatgctccctgaatattcaagagaactattgccgggtattgaagacgaacaaatcatgcccgccacactagcaccagagttacttaatggtttattaagggaaaagttaggttttaatggtttaatcgtgactgatgcatcccctatgttagggttcactacttcggaaagaagagaaattgctgttcctaaggcgattgcttcgggctgtgatatgtttctcttcaaccgtaacataaaagaagattatgagttcatgctgaatggaattgaaactggaattctaaccttggaaagagtagatgaagctgttactagagtacttgctcttaaagcatctctaggtctgaatgtacaaaaggaattgggaatattagtacctgaagaagcggaattgtcggtattacaatctgaagaacatttggattgggcaagagaatgtgcagaccaatcggttacattagtaaaggatacacaaaaactgctgcctattagtgctgatcagtataaacgggttcgactttatgtattgggtgatcaagaaggagggctaaaggaaggcggctccgtcactcaaccgtttatcgattctcttaaaaatgctggctttgaagtagatttatataatgacaagcaagttaatttccaagaactgtttatgagtgtaaacgagtttaaaaagaactatgatctgatcatttatgtcgccaaccttgaaaccgctagtaaccaaacgacagtcagaattaattggcagcagccgctaaatgccaacgctccatggtttgttaaagatataccgacattatttatttcggttgctaacccataccatctacaggacgtaccaatggttaagacctatataaatgcttattcatctaatgaatatgtggtagaagcaattgtagataaaatcttaggaaaatcagagtttaaagggaagaatcccgtcgatccgttttgtgggaaatgggataccagactttaa

SEQ ID NO: 528 - protein, 574 aa, Unknown
  Obtained from environmental sample
  DOMAIN (87)...(320): Glycosyl hydrolase family 3 N terminal domain
  SITE (7)...(10): N-glycosylation site. Prosite id = PS00001
  SITE (495)...(498): N-glycosylation site. Prosite id = PS00001
MLKLSDNLTFLKSKPFFLNEKEMKWVEKTLQSMSLHEKVGQLFCPIGGSDNKQELEAFIKEYHPGGIMYRPNTGAKIQETHRLLQELSPVPLLISANLEAGGNGIATDGTYFGKQMQVAATDNEEMAYKLGLVAGREGRVAGCNWAFAPIVDIDMNYRNPITNVRTYGSDPIRVAQMSKAFMKGIHESGLAAAVKHFPGDGVDDRDQHLLSSVNTLSTEEWDQTFGMVYQEMIDSGAKSIMAGHIMLPEYSRELLPGIEDEQIMPATLAPELLNGLLREKLGFNGLIVTDASPMLGFTTSERREIAVPKAIASGCDMFLFNRNIKEDYEFMLNGIETGILTLERVDEAVTRVLALKASLGLNVQKELGILVPEEAELSVLQSEEHLDWARECADQSVTLVKDTQKLLPISADQYKRVRLYVLGDQEGGLKEGGSVTQPFIDSLKNAGFEVDLYNDKQVNFQELFMSVNEFKKNYDLIIYVANLETASNQTTVRINWQQPLNANAPWFVKDIPTLFISVANPYHLQDVPMVKTYINAYSSNEYVVEAIVDKILGKSEFKGKNPVDPFCGKWDTRL

SEQ ID NO: 529 - DNA, 1347 bp, Clostridium thermocellum
atgtcaaagataactttcccaaaagatttcatatggggttctgcaacagcagcatatcagattgaaggtgcatacaacgaagacggcaaaggtgaatctatatgggaccgtttttcccacacgccaggaaatatagcagacggacataccggcgatgttgcatgcgaccactatcatcgttatgaagaagatatcaaaataatgaaagaaatcggtattaaatcatacaggttttccatctcatggcccagaatctttcctgaaggaacaggtaaattaaatcaaaagggactggatttttacaaaaggctcacaaatctgcttctggaaaacggaattatgcctgcaatcactctttatcactgggaccttccccaaaagcttcaggataaaggcggatggaaaaaccgggacaccaccgattattttacagaatactctgaagtaatatttaaaaatctcggagatatcgttccaatatggtttactcacaatgaacccggtgttgtttctttgcttggccactttttaggaattcatgcccctgggataaaagacctccgcacttcattggaagtctcgcacaatcttcttttgtcccacggcaaggccgtgaaactgtttagagaaatgaatattgacgcccaaattggaatagctctcaatttatcttaccattatcccgcatccgaaaaagctgaggatattgaagcagcggaattgtcattttctctggcgggaaggtggtatctggatcctgtgctaaaaggccggtatcctgaaaacgcattgaaactttataaaaagaagggtattgagctttctttccctgaagatgacctgaaacttatcagtcagccaatagacttcatagcattcaacaattattcttcggaatttataaaatatgatccgtccagtgagtcaggtttttcacctgcaaactccatattagaaaagttcgaaaaaacagatatgggctggatcatatatcctgaaggcttgtatgatctgcttatgctccttgacagggattatggaaagccaaacattgttatcagcgaaaacggagccgccttcaaagatgaaataggtagcaacggaaagatagaagacacaaagagaatccaatatcttaaagattatctgacccaggctcacagggcaattcaggacggtgtaaacttaaaagcatactacttgtggtcgcttttggacaactttgaatgggcttacgggtacaacaagagattcggaatcgttcacgtaaattttgatacgttggaaagaaaaataaaggatagcggctactggtacaaagaagtaatcaaaaacaacggtttttaa

SEQ ID NO: 530 - protein, 448 aa, Clostridium thermocellum
  DOMAIN (2)...(448): Glycosyl hydrolase family 1
  SITE (10)...(24): Glycosyl hydrolases family 1 N-terminal signature. Prosite id = PS00653
  SITE (225)...(228): N-glycosylation site. Prosite id = PS00001
  SITE (299)...(302): N-glycosylation site. Prosite id = PS00001
  SITE (356)...(364): Glycosyl hydrolases family 1 active site. Prosite id = PS00572
MSKITFPKDFIWGSATAAYQIEGAYNEDGKGESIWDRFSHTPGNIADGHTGDVACDHYHRYEEDIKIMKEIGIKSYRFSISWPRIFPEGTGKLNQKGLDFYKRLTNLLLENGIMPAITLYHWDLPQKLQDKGGWKNRDTTDYFTEYSEVIFKNLGDIVPIWFTHNEPGVVSLLGHFLGIHAPGIKDLRTSLEVSHNLLLSHGKAVKLFREMNIDAQIGIALNLSYHYPASEKAEDIEAAELSFSLAGRWYLDPVLKGRYPENALKLYKKKGIELSFPEDDLKLISQPIDFIAFNNYSSEFIKYDPSSESGFSPANSILEKFEKTDMGWIIYPEGLYDLLMLLDRDYGKPNIVISENGAAFKDEIGSNGKIEDTKRIQYLKDYLTQAHRAIQDGVNLKAYYLWSLLDNFEWAYGYNKRFGIVHVNFDTLERKIKDSGYWYKEVIKNNGF

SEQ ID NO: 531 - DNA, 1362 bp, Unknown
  Obtained from environmental sample
atggcaaacaagataacctttcctgaaaattttctgtggggcgcggcaacggcttcgtaccagatcgaaggcgcctggaacaaacatggtaaaggcgaatccacctgggatcgcttttcacacacgcccggtaagatcaggaacaacgatacgggcgatgtagcaaatgaccattatcgcctctggaaaaaagacattggcttgatgaagaagatcgggttgaaggcttatcgattttccatttcgtggccgcgtattcttcctgctggaagaggcaaggtcaatcaaagagggctggatttttacaacaagatcgtagatgagctgctgaaagcagatatcatcccatttgttactctcaatcactgggacctgccccaaaaactggaagatgagggcggctggccggcccgttctactgccgatgcttttattgaatacacagatgtgatcacccgctcccttggcgaccgcgcaaagaattggatcactcacaatgaacctgccgtcgttgcctggatgggatactccactggccaacacgcacccggactgaaggactatgggcttggtgcccgcgccgcgcatcacctgttgctctcacatggacaggctgtaccggtcattcgcagcaatagcgcgggggcagaagtgggaattacgctcgatattagctggcggatcgctgcctcaaacagccgcgccgaccgggagctggtccgtgaggatgatgggaggtggttccgctggtttgccgacccgctttacgggcgcggatatccctccgataaggtgtctgatttcactaagttgggagcactgcccaacggacttgattttgtgcaggcaggcgacatggacacgatcgcgacaccgactgattttatggggctaaactactactcccgaaatgtctaccgcgcggacggtgcagataatgatccgcaaactgttttcccacaaccgaagatgcccgaacactggaccgagatgggctgggaaatttacccggatgggctgaccaacattctgggacgcgtctatttcaactatcagccgcgcaaactatacgtcacagaaaacggcgccagttactccacgcctcctgatgataaggggaatgtcgcggatgaactccgcatccattatctgaggacacattttgcagctgcctatcgggccattcaaatgggcgtgcctctggcaggatacttcgtctggtccctcatggacaactttgagtggtcatggggctatatgcaacgctttggactcatctgggtggattatgagacccaaaaacgcactttaaaggatagcgcaaaatggtataagcgcgtgatcaagaagaatgggctctaa

SEQ ID NO: 532 - protein, 453 aa, Unknown
  Obtained from environmental sample
  DOMAIN (3)...(453): Glycosyl hydrolase family 1
  SITE (11)...(25): Glycosyl hydrolases family 1 N-terminal signature. Prosite id = PS00653
  SITE (49)...(52): N-glycosylation site. Prosite id = PS00001
  SITE (361)...(369): Glycosyl hydrolases family 1 active site. Prosite id = PS00572
MANKITFPENFLWGAATASYQIEGAWNKHGKGESTWDRFSHTPGKIRNNDTGDVANDHYRLWKKDIGLMKKIGLKAYRFSISWPRILPAGRGKVNQRGLDFYNKIVDELLKADIIPFVTLNHWDLPQKLEDEGGWPARSTADAFIEYTDVITRSLGDRAKNWITHNEPAVVAWMGYSTGQHAPGLKDYGLGARAAHHLLLSHGQAVPVIRSNSAGAEVGITLDISWRIAASNSRADRELVREDDGRWFRWFADPLYGRGYPSDKVSDFTKLGALPNGLDFVQAGDMDTIATPTDFMGLNYYSRNVYRADGADNDPQTVFPQPKMPEHWTEMGWEIYPDGLTNILGRVYFNYQPRKLYVTENGASYSTPPDDKGNVADELRIHYLRTHFAAAYRAIQMGVPLAGYFVWSLMDNFEWSWGYMQRFGLIWVDYETQKRTLKDSAKWYKRVIKKNGL

SEQ ID NO: 533 - DNA, 1338 bp, Unknown
  Obtained from environmental sample
atgtcttttcctagtaactttttatggggagcagcaactgctgcctatcagattgaaggcgctgtaaatgaggatggtcgtaaaccatgcatttgggataccttatcaaaagggcatgtagtttacgatgaaacaggagagaatgcctgtgaccattaccaccgctttgaagaagatattaagctgatgaaagagatcgggcttaaatgttatagattctcggttgcttggcctcgcatcatccctgatggcactggtgctgttaatgaaaagggtattgagttctatgtaaagcttgtaaagctgttaaaagaaaatgacattgaacctatcgttaccttatatcactgggatcttccatactcactttatttaaaaggtggttggacaaatcctgagatccaagagtggtttttagagtacacaaaggttgtagtaaaggctctatctccatatgtaaagtacttccttacatttaatgagcctcagtgttttatcggtatttcttatgtaggtggtgttcatgctccatttttagatgagcctacatcattattacctgctacaagaaatgtcttactagcacacggtaaagctgtaaaagctattagagagctagctccaaacgcaaaagtaggctttgctccaacaggtgctgtctatgcacctcacaaccacacagaatatgagtacaagaaagcttatgaacttactttctcagacagaagaggtccattctcagttgcttggtggtgtgatcctgtatttaaaggatctattactccacgcgcagcttcttacatgaatattgccccagagaattttatgacggaagttgagtggcagattgtaactgagaaattagatttcttaggctttaacttctatcagtgcgacggcattcaggaaaatggtcagaagtacccagacaatacattctgtggaggacctgtaactgctatgaactggcctattacacctgagggtatgtattacgcagttaagttcttaaaagagcgttatcaaagaccaattctgataacagaaaacggcatggcaaatactgattttgtaatgctagacggtaaagttcatgatccacagagaattgattatgttcaccgttatcttttagctttaaataaagctattgaagagggaatagaggtaattggctataactactggtcacttatggataactttgagtgggctgaaggttataaatatagatttggtcttatctatgttgattacagaactcaaaagaggacactaaaagactctgcttactggtataagaacgtaattgcttcaaatggagagaatttgttctag

SEQ ID NO: 534 - protein, 445 aa, Unknown
  Obtained from environmental sample
  DOMAIN (2)...(442): Glycosyl hydrolase family 1
  SITE (7)...(21): Glycosyl hydrolases family 1 N-terminal signature. Prosite id = PS00653
  SITE (228)...(231): N-glycosylation site. Prosite id = PS00001
  SITE (350)...(358): Glycosyl hydrolases family 1 active site. Prosite id = PS00572
MSFPSNFLWGAATAAYQIEGAVNEDGRKPCIWDTLSKGHVVYDETGENACDHYHRFEEDIKLMKEIGLKCYRFSVAWPRIIPDGTGAVNEKGIEFYVKLVKLLKENDIEPIVTLYHWDLPYSLYLKGGWTNPEIQEWFLEYTKVVVKALSPYVKYFLTFNEPQCFIGISYVGGVHAPFLDEPTSLLPATRNVLLAHGKAVKAIRELAPNAKVGFAPTGAVYAPHNHTEYEYKKAYELTFSDRRGPFSVAWWCDPVFKGSITPRAASYMNIAPENFMTEVEWQIVTEKLDFLGFNFYQCDGIQENGQKYPDNTFCGGPVTAMNWPITPEGMYYAVKFLKERYQRPILITENGMANTDFVMLDGKVHDPQRIDYVHRYLLALNKAIEEGIEVIGYNYWSLMDNFEWAEGYKYRFGLIYVDYRTQKRTLKDSAYWYKNVIASNGENLF

SEQ ID NO: 535 - DNA, 1263 bp, Thermococcus alcaliphilus
atgattgtctttccggagttcttcctctttggaaccgccacatcttctcatcagatcgagggagataataaatggaacgactggtggtattatgaggagataggtaagctcccctacaaatccggtaaagcctgcaatcactgggagctttacagggaagatatagagctaatggcacagctcggctacaatgcctaccgcttttcgatagagtggagccgtctcttcccggaagagggcaaattcaatgaagaagccttcaaccgctaccgtgaaataattgaaatcctccttgagaaggggattactccaaacgttacactgcaccacttcacatcaccgctgtggttcatgcggaagggaggctttttgaaggaagaaaacctcaagtactgggagcagtacgttgataaagccgcggagctcctcaagggagtcaagcttgtagctacattcaacgagccgatggtctatgttatgatgggctacctcacagcctactggccgcccttcatcaagagtccctttaaagcctttaaagttgccgcaaacctccttaaggcccatgcaatggcatatgatatcctccatggtaactttgatgtggggatagttaaaaacatccccataatgctccctgcaagcaacagagagaaagacgtagaagctgcccaaaaggcggataacctctttaactggaacttccttgatgcaatatggagcggaaaatataaaggagcttttggaacttacaaaactccagaaagcgatgcagacttcatagggataaactactacacagccagcgaggtaaggcatagctggaatccgctaaagtttttcttcgatgccaagcttgcagacttaagcgagagaaaaacagatatgggttggagtgtctatccaaagggcatatacgaagctatagcaaaggtttcacactacggaaagccaatgtacatcacggaaaacgggatagctaccttagacgatgagtggaggatagagtttatcatccagcacctccagtacgttcacaaagccttaaacgatggctttgacttgagaggctacttctattggtcttttatggataacttcgagtgggctgagggttttagaccacgctttgggctggtcgaggtggactacacgaccttcaagaggagaccgagaaagagtgcttacatatatggagaaattgcaagggaaaagaaaataaaagacgaactgctggcaaagtatgggcttccggagctatga

SEQ ID NO: 536 - protein, 420 aa, Thermococcus alcaliphilus
  DOMAIN (2)...(407): Glycosyl hydrolase family 1
  SITE (106)...(109): N-glycosylation site. Prosite id = PS00001
MIVFPEFFLFGTATSSHQIEGDNKWNDWWYYEEIGKLPYKSGKACNHWELYREDIELMAQLGYNAYRFSIEWSRLFPEEGKFNEEAFNRYREIIEILLEKGITPNVTLHHFTSPLWFMRKGGFLKEENLKYWEQYVDKAAELLKGVKLVATFNEPMVYVMMGYLTAYWPPFIKSPFKAFKVAANLLKAHAMAYDILHGNFDVGIVKNIPIMLPASNREKDVEAAQKADNLFNWNFLDAIWSGKYKGAFGTYKTPESDADFIGINYYTASEVRHSWNPLKFFFDAKLADLSERKTDMGWSVYPKGIYEAIAKVSHYGKPMYITENGIATLDDEWRIEFIIQHLQYVHKALNDGFDLRGYFYWSFMDNFEWAEGFRPRFGLVEVDYTTFKRRPRKSAYIYGEIAREKKIKDELLAKYGLPEL

SEQ ID NO: 537 - DNA, 2166 bp, Thermotoga maritima MSB8
atggaaaggatcgatgaaattctctctcagttaactacagaggaaaaggtgaagctcgttgtgggggttggtcttccaggactttttgggaacccacattccagagtggcgggtgcggctggagaaacacatcccgttccaagacttggaattcctgcgtttgtcctggcagatggtcccgcaggactcagaataaatcccacaagggaaaacgatgaaaacacttactacacgacggcatttcccgttgaaatcatgctcgcttctacctggaacagagaccttctggaagaagtgggaaaagccatgggagaagaagttagggaatacggtgtcgatgtgcttcttgcacctgcgatgaacattcacagaaaccctctttgtggaaggaatttcgagtactactcagaagatcctgtcctttccggtgaaatggcttcagcctttgtcaagggagttcaatctcaaggggtgggagcctgcataaaacactttgtcgcgaacaaccaggaaacgaacaggatggtagtggacacgatcgtgtccgagcgagccctcagagaaatatatctgaaaggttttgaaattgctgtcaagaaagcaagaccctggaccgtgatgagcgcttacaacaaactgaatggaaaatactgttcacagaacgaatggcttttgaagaaggttctcagggaagaatggggatttggcggtttcgtgatgagcgactggtacgcgggagacaaccctgtagaacagctcaaggccggaaacgatatgatcatgcctgggaaagcgtatcaggtgaacacagaaagaagagatgaaatagaagaaatcatggaggcgttgaaggagggaaaattgagtgaggaggttctcgatgagtgtgtgagaaacattctcaaagttcttgtgaacgcgccttccttcaaagggtacaggtactcaaacaagccggatctcgaatctcacgcggaagtcgcctacgaagcaggtgcggagggtgttgtccttcttgagaacaacggtgttcttccgttcgatgaaaatacccatgtcgccgtctttggcaccggtcaaatcgaaacaataaagggaggaacgggaagtggagacacccatccgagatacacgatctctatccttgaaggcataaaagaaagaaacatgaagttcgacgaagaactcgcttccacttatgaggagtacataaaaaagatgagagaaacagaggaatataaacccagaaccgactcttggggaacggtcataaaaccgaaactcccagagaatttcctctcagaaaaagagataaagaaacctccaaagaaaaacgatgttgcagttgttgtgatcagtaggatctccggtgagggatacgacagaaagccggtgaaaggtgacttctacctctccgatgacgagctggaactcataaaaaccgtctcgaaagaattccacgatcagggtaagaaagttgtggttcttctgaacatcggaagtcccatcgaagtcgcaagctggagagaccttgtggatggaattcttctcgtctggcaggcgggacaggagatgggaagaatagtggccgatgttcttgtgggaaagattaatccctccggaaaacttccaacgaccttcccgaaggattactcggacgttccatcctggacgttcccaggagagccaaaggacaatccgcaaagagtggtgtacgaggaagacatctacgtgggatacaggtactacgacaccttcggtgtggaacctgcctacgaattcggctacggcctctcttacacaaagtttgaatacaaagatttaaaaatcgctatcgacggtgagacgctcagagtgtcgtacacgatcacaaacactggggacagagctggaaaggaagtctcacaggtctacatcaaagctccaaaaggaaaaatagacaaacccttccaggagctgaaagcgtttcacaaaacaaaacttttgaacccgggtgaatcagaagaaatctccttggaaattcctctcagagatcttgcgagtttcgatgggaaagaatgggttgtcgagtcaggagaatacgaggtcagggtcggtgcatcttcgagggatataaggttgagagatatttttctggttgagggagagaagagattcaaaccatga

SEQ ID NO: 538 - protein, 721 aa, Thermotoga maritima MSB8
  DOMAIN (43)...(262): Glycosyl hydrolase family 3 N terminal domain
  DOMAIN (336)...(602): Glycosyl hydrolase family 3 C terminal domain
  SITE (231)...(248): Glycosyl hydrolases family 3 active site. Prosite id = PS00775
MERIDEILSQLTTEEKVKLVVGVGLPGLFGNPHSRVAGAAGETHPVPRLGIPAFVLADGPAGLRINPTRENDENTYYTTAFPVEIMLASTWNRDLLEEVGKAMGEEVREYGVDVLLAPAMNIHRNPLCGRNFEYYSEDPVLSGEMASAFVKGVQSQGVGACIKHFVANNQETNRMVVDTIVSERALREIYLKGFEIAVKKARPWTVMSAYNKLNGKYCSQNEWLLKKVLREEWGFGGFVMSDWYAGDNPVEQLKAGNDMIMPGKAYQVNTERRDEIEEIMEALKEGKLSEEVLDECVRNILKVLVNAPSFKGYRYSNKPDLESHAEVAYEAGAEGVVLLENNGVLPFDENTHVAVFGTGQIETIKGGTGSGDTHPRYTISILEGIKERNMKFDEELASTYEEYIKKMRETEEYKPRTDSWGTVIKPKLPENFLSEKEIKKPPKKNDVAVVVISRISGEGYDRKPVKGDFYLSDDELELIKTVSKEFHDQGKKVVVLLNIGSPIEVASWRDLVDGILLVWQAGQEMGRIVADVLVGKINPSGKLPTTFPKDYSDVPSWTFPGEPKDNPQRVVYEEDIYVGYRYYDTFGVEPAYEFGYGLSYTKFEYKDLKIAIDGETLRVSYTITNTGDRAGKEVSQVYIKAPKGKIDKPFQELKAFHKTKLLNPGESEEISLEIPLRDLASFDGKEWVVESGEYEVRVGASSRDIRLRDIFLVEGEKRFKP

SEQ ID NO: 539 - DNA, 1389 bp, Unknown
  Obtained from environmental sample
atgagcgcttcgagtccctcccgccccctgtccttcccagagcagttcgtctggggtgctgccgcggcctcctaccaagtcgagggcgccgtccacgaggacgggaagggcccctccgtctgggacatgttctgcgagaagcccggagcggtcttccaggggcacgacggggcggtggcttgcgaccactatcaccgctaccgagaggacgtggcgttgatgcgacaggtgggcctgcacgcctaccgcctgagcgtgtgctggccccgagtgctcccggagggcgtcgggcagcccaacgagaagggcctcgacttctactcgcggttggtggacgcgctgctcgaggcagggattacgccctgggtaacgctttttcattgggactaccccttggctctctatcaccgggggggctggctcaaccgggatagcgcggattggtttgccgagtacgcgggcctaatcgccgatcgcctctccgaccgggtgcagcatttcttcactcagaacgagccccaggtctatatcggcttcggacacctcgagggtaagcatgctccaggagacaccttgcccatgtcccaggtgctgcttgcggggcatcatagcctactggcgcacggcaaggccgtgcaggcgctccgcgcccaggcgaagcagcagctgcgcgtcggctacgctcccgtcggcatgcccctccatcccttcacggactcggccgaggacgtggccgctgcgcggaaggcgaccttttgggttcgggagaagaactcctggaacaacgcctggtggatggacccggtgttcttgggtgagtacccggctcagggcctcgccttcttcggccgggacgtgccgcaggtgcgcgagggagacatgcagctcatcgcgcagcccttggacttctttggggtcaacatctaccagagcacccccgtgcgcgcgtctagcgccgaaagcggcttcgaggtcgtcccccatccaacgggctatcctatcactgccttcaactggccgatcacgccccaggccctctactggggtccgcgcttcttctacgagcgctaccagaagccgatcgtcatcacggagaacggactgtcctgtcgggacgtcgtcgctgtggacgggaaggttcacgatccggctcgcatcgatttcaccacccgctatctgcgcgagctccaccgagccgtcgcggacggcgtcgcggtcgagggctacttccactggtccatcatggacaacttcgaatgggctgccggctaccgcgagcggttcgggctcattcacgtcgactacgagaccctggcgcggacgcccaaggcgtccgctgcgtggtatcgcaaggtaatcgagagcaacggagcgacccttttcggatga

SEQ ID NO: 540 - protein, 462 aa, Unknown
  Obtained from environmental sample
  DOMAIN (8)...(458): Glycosyl hydrolase family 1
  SITE (16)...(30): Glycosyl hydrolases family 1 N-terminal signature. Prosite id = PS00653
  SITE (366)...(374): Glycosyl hydrolases family 1 active site. Prosite id = PS00572
MSASSPSRPLSFPEQFVWGAAAASYQVEGAVHEDGKGPSVWDMFCEKPGAVFQGHDGAVACDHYHRYREDVALMRQVGLHAYRLSVCWPRVLPEGVGQPNEKGLDFYSRLVDALLEAGITPWVTLFHWDYPLALYHRGGWLNRDSADWFAEYAGLIADRLSDRVQHFFTQNEPQVYIGFGHLEGKHAPGDTLPMSQVLLAGHHSLLAHGKAVQALRAQAKQQLRVGYAPVGMPLHPFTDSAEDVAAARKATFWVREKNSWNNAWWMDPVFLGEYPAQGLAFFGRDVPQVREGDMQLIAQPLDFFGVNIYQSTPVRASSAESGFEVVPHPTGYPITAFNWPITPQALYWGPRFFYERYQKPIVITENGLSCRDVVAVDGKVHDPARIDFTTRYLRELHRAVADGVAVEGYFHWSIMDNFEWAAGYRERFGLIHVDYETLARTPKASAAWYRKVIESNGATLFG

SEQ ID NO: 541 - DNA, 1350 bp, Unknown
  Obtained from environmental sample
atgctgtcctatacgagtccgttcccaaagaactttgtctggggtgtggcgacggcggcgccgcagatcgagggcgctgcgcgagaagacggaaagggcgaatcgatatgggatcgcttttgccgcgtgcccggaaaggtccacaatggcgatactctcgatgttgcgtgcgaccactaccaccggttccgggaggatttcgcgctcatgcgagacttgggcgtgcgccactaccggctttcgcttgcctggccccgcatattcccggacggcgacggcgcattgaaccagcgcggagtggatttctaccaccggctctttgaggccatgatcgagcacgggattacgccttgggtgacgctctttcactgggatttgccgcaggcgctcgaggaccgcggcggctggtgtgagcgtctcaccgtcgatgcattcgggcgctacgctgacaccgtggtgaaggcgtttggcgatcgcgtgaagaattggatcaccctgaacgaaatccgctgcttcacgttgctcgcttacgatctctgcatcaaggccccgggccgcaaggtctcgcgggcgcagctcaaccagacctatcatcacgcgctgatctgccatgggcatggcgtccgggcggtccgcgaacacggcgggcgaggcgctcgcgtcgggcttaccgacaacagcgacgtatgcgtgcccgtcaccgagaccgcgcccgacatcattgcggccagatcctggtatgcgtcgcgaaatattcatctgctcgatccgatctatcgcggcgagtatgcgccggaatacctcgaacgctgcggtgcggacgcgccccaggtggccgaggacgatttcgcgctgatttcaatgccgacggattttctcgggctgaatgtatatacggcgacctttgtgcgtgccgacgcggagggcaggccggaggagattaaactgccgcggaattacccgcgcgcggatagcgcgtggttgaatattgtgccccagtcgatgtactgggccacacggctggcgcgggaaacctacggcgtgagatcaatctacatcaccgaaaacggctgcggctacgacgacgagcccgtcgacggcggcgaggtgctcgacctgcatcgacgcgattttctgcgcaaccaccttcgggaattgcatcgcgccataggcgacggcgtgcccgttgacgggtattttctctggtccttcatggacaactacgagtgggaggacgggtatgcgcggcggttcggcatcgttcacgtcgacttcgaaagccagaaacggactccaaaactctcggcgcgctattacgcgcaggtaatgaaagaaaaccggatcctgtga

SEQ ID NO: 542 - protein, 449 aa, Unknown
  Obtained from environmental sample
  DOMAIN (4)...(448): Glycosyl hydrolase family 1
MLSYTSPFPKNFVWGVATAAPQIEGAAREDGKGESIWDRFCRVPGKVHNGDTLDVACDHYHRFREDFALMRDLGVRHYRLSLAWPRIFPDGDGALNQRGVDFYHRLFEAMIEHGITPWVTLFHWDLPQALEDRGGWCERLTVDAFGRYADTVVKAFGDRVKNWITLNEIRCFTLLAYDLCIKAPGRKVSRAQLNQTYHHALICHGHGVRAVREHGGRGARVGLTDNSDVCVPVTETAPDIIAARSWYASRNIHLLDPIYRGEYAPEYLERCGADAPQVAEDDFALISMPTDFLGLNVYTATFVRADAEGRPEEIKLPRNYPRADSAWLNIVPQSMYWATRLARETYGVRSIYITENGCGYDDEPVDGGEVLDLHRRDFLRNHLRELHRAIGDGVPVDGYFLWSFMDNYEWEDGYARRFGIVHVDFESQKRTPKLSARYYAQVMKENRIL

SEQ ID NO: 543 - DNA, 1188 bp, Unknown
  Obtained from environmental sample
atgaccatcaccttccccgacgggttctggtgggggacggcgacggccgcccaccaggtggagggcggcaactggaacaccgactggtgggcctacgagcacgccccgggcacccgctgcgcggagccgtccggcgatgcgtgcgaccactggcaccgctacccggaggacatcgccctcctcgccgcgctcgggttcagtgcctaccgcttctcggtggaatgggctcgcatcgagcccgaggaagggcatttctcccgcgccaccctcgaccactaccggcgcatgatcgcctgctgccgcgaccacgggctggccccggtggtgaccttccaccacttcaccaccccccgctgggccgcggccgggggctgctggtccgacccggtcaccgccgagcgcttcgcccgttactgcgagcgcaccgtggccgccctcggcgacgagatcgcgatggcctgcacgatcaacgagccgaacatcgtggccaccctcgggtacttcctcggcgagttcccgccggccgtcgccgaccccgaccgctaccggcaggcgaacgacacgctgatccgcgcccatcgcctcgcctacgaggcgctgaaggccgggcccggcgagttccccgtcggcctcaccctgtcgatggccgagttcgtcgccgagcccggcggcgaggcccacctcgcccaggtccggcacacgatggaggacatcttcctggaggccgcccggggcgacgacttcatcggggtgcagacctacagccgcatgcgcttcggtcccgactcgccgatcccgctcgggccggccgagggcgtcgaggtcgtccagatggggtacgagtactggccgtgggcgctcgaggcgacgatccggcgcgccgccgaggtcaccggcacggcggtccacgtcaccgagaacggcatcgggaccgccgacgacacgcagcgggtcgcctacgtcaccgaggccctccgggggctgcggcgctgcctcgacgacggcatcgacgtccgcagctacttctactggacgctgctcgacaacttcgagtggacgcgcggctacgtgccgacgttcgggctcgtcgccgtcgaccgcaccacccagcgccggtcggtgaagccgagcgcggtgtggctcggcgaggtcgcccgcacgaaccgcctcgagctcccggaccgctga

SEQ ID NO: 544 - protein, 395 aa, Unknown
  Obtained from environmental sample
  DOMAIN (1)...(390): Glycosyl hydrolase family 1
  SITE (9)...(23): Glycosyl hydrolases family 1 N-terminal signature. Prosite id = PS00653
  SITE (188)...(191): N-glycosylation site. Prosite id = PS00001
MTITFPDGFWWGTATAAHQVEGGNWNTDWWAYEHAPGTRCAEPSGDACDHWHRYPEDIALLAALGFSAYRFSVEWARIEPEEGHFSRATLDHYRRMIACCRDHGLAPVVTFHHFTTPRWAAAGGCWSDPVTAERFARYCERTVAALGDEIAMACTINEPNIVATLGYFLGEFPPAVADPDRYRQANDTLIRAHRLAYEALKAGPGEFPVGLTLSMAEFVAEPGGEAHLAQVRHTMEDIFLEAARGDDFIGVQTYSRMRFGPDSPIPLGPAEGVEVVQMGYEYWPWALEATIRRAAEVTGTAVHVTENGIGTADDTQRVAYVTEALRGLRRCLDDGIDVRSYFYWTLLDNFEWTRGYVPTFGLVAVDRTTQRRSVKPSAVWLGEVARTNRLELPDR

SEQ ID NO: 545 - DNA, 1386 bp, Unknown
  Obtained from environmental sample
atgtcgtttccgagaaatttcctgtggggatcagccacctcctcctaccaaatcgaaggcgcctggcaagaagacggcaaaggcccaaatatctgggacgtgttttcacacaccccggggaaagtcgccaatggcgacaccggtgatatcgccatcgaccactaccaccgataccgagacgacgttgccctgatggctgagcttggacttcaggcataccgtttctcgttctcctgggccagaataatgccggaaggagcaggccccatcgagcaacggggtctggacttctacgaccgcctcattgatgcactgctggagaaaaacatccaacccatggccaccctctaccactgggatttaccagccgcactgcaagacagaggggggtggactaaccgcgacagcgcgtcctggtttgctgactactcagccgttgttcacgacgctttttctgaccgggtgggaatgtgggcaacgttgaacgagccgtgggtgtctgcatttttgggccacggaactggcatccacgcacctggcatcacaagcccccacgcggcgttcgccgcggggcatcacctgcttctggggcatggcaaggccatccaagcgatgcgcgctcaatcgtctagcacccaactgggaattgttttgaacctcgcccccgtgtatctcgaaggtgacacccctgctgaccacccggctcacacctccgtggcactacacgatgccattttgaatgggttgtggacagagccgcttctgcgctccagataccccgacctgcttcttcaactaggcgacatggtgacaaaaaacatccacgacggtgacctcgccatcatggccgagccgattgactggatgggcatcaactactaccaggacattagatttgtggccactgatgttgcccccacggctaacccgatggcccctccgggtaacgacctgccgggcaccgtcggggtggagcctgcgccagcaatcggaaacatcaccagctttggctggtccaccacccccgacggactgcgagtactgttggtgggcctggatgaggaatacgacaacctcccgccgatattcattaccgaaaacgggtgtgcttacgattaccccgtcgaggacggtgtcgtcaacgacacccttcgtgtcacatacatgcgagaacacctcaccgcgttgtcgcaggccattgaggcgggtgtgaatgtccggggctatatgcactggtctctgttcgacaacttcgagtgggccgaagggtatcgccaacgctttggcatggtgcacgtcgactttgagaccttggagcggactcccaaagcctcagctcactactattcacgtgtcatcacaaataacgccctctctgacgactga

SEQ ID NO: 546 - protein, 461 aa, Unknown
  Obtained from environmental sample
  DOMAIN (2)...(458): Glycosyl hydrolase family 1
  SITE (7)...(21): Glycosyl hydrolases family 1 N-terminal signature. Prosite id = PS00653
  SITE (337)...(340): N-glycosylation site. Prosite id = PS00001
  SITE (386)...(389): N-glycosylation site. Prosite id = PS00001
MSFPRNFLWGSATSSYQIEGAWQEDGKGPNIWDVFSHTPGKVANGDTGDIAIDHYHRYRDDVALMAELGLQAYRFSFSWARIMPEGAGPIEQRGLDFYDRLIDALLEKNIQPMATLYHWDLPAALQDRGGWTNRDSASWFADYSAVVHDAFSDRVGMWATLNEPWVSAFLGHGTGIHAPGITSPHAAFAAGHHLLLGHGKAIQAMRAQSSSTQLGIVLNLAPVYLEGDTPADHPAHTSVALHDAILNGLWTEPLLRSRYPDLLLQLGDMVTKNIHDGDLAIMAEPIDWMGINYYQDIRFVATDVAPTANPMAPPGNDLPGTVGVEPAPAIGNITSFGWSTTPDGLRVLLVGLDEEYDNLPPIFITENGCAYDYPVEDGVVNDTLRVTYMREHLTALSQAIEAGVNVRGYMHWSLFDNFEWAEGYRQRFGMVHVDFETLERTPKASAHYYSRVITNNALSDD

SEQ ID NO: 547 - DNA, 1377 bp, Unknown
  Obtained from environmental sample
atgacacaactggcttttccatctaacttcatctggggaacagctacttccgcttaccaaatcgaaggcgcctggaacgcagacggcaagggcgaatctatttgggatcgcttttcccatacgcaggggaagatcattgacggcagcaacggcgatgtggcctgcgatcactaccaccgctggcgcgaggacgtggccctcatgagagacttgggtatgcaggcatatcgcttctccatctcctggccacgcatcctgcccaccggtcatggacagatcaatcaggctgggctggacttttacaatcgcctggtggacgggttgctggaagctggcatcaagccctttgccaccctctaccactgggacctgccgctggcgctacaggctgacggcggctggccggagcgctccacggccaaggcctttgtcgaatacgccgacgtggtcagccgcgcgctgggcgatcgggtgaagagctggatcacccataacgaaccgtggtgcatcagcatgctgagccatcaaattggggagcatgcgcccggctggcgggactggcaggctgcgttggcggccgcgcaccacgtcctcctttcgcatggttgggccgtgccggaactgcgtcgcaacagccgcgatgcagaaatcggcatcacgttgaactttaccccggcggagccagcttcgaacagcgcagccgatttcaaggcctatcgccagttcgatggctacttcaaccgctggttcctggacccgctctatggccgccactatccggcagatatggtgcacgattacatcgcgcaaggctacctgccatcacagggtttgactttcgtggaagctggtgacctggacgcgatcgcgacgcgcaccgatttcctgggtgtgaactattacacgcgcgaagtggtccgtagccaggaaatcccagagagtgagaacgcgccgcgcacagtcttgcgcgcgccacaggaagagtggacagagatgggctgggaagtgtatcctgagggcctctacaggttgctcaatcggttgcactttgaataccagccgcgcaagctctacgtgaccgagagcggttgcagctactccgatggacccggccccaacggtcggataccggaccaacgccgtatcaactacctgcgcgatcacttcgcagcggcgcatcaggcgatacaatgcggcgtcccgctggccggctacttcgtctggtcgttcatggacaacttcgagtgggccaaagggtacacccaacgttttggtatcgtatgggtggattatcaatcgcaacgacggataccgaaagacagcgcctactggtatcgcgatgtcgtcgccgccaacgcggtgcaagttcctgattag

SEQ ID NO: 548 - protein, 458 aa, Unknown
  Obtained from environmental sample
  DOMAIN (2)...(454): Glycosyl hydrolase family 1
  SITE (10)...(24): Glycosyl hydrolases family 1 N-terminal signature. Prosite id = PS00653
MTQLAFPSNFIWGTATSAYQIEGAWNADGKGESIWDRFSHTQGKIIDGSNGDVACDHYHRWREDVALMRDLGMQAYRFSISWPRILPTGHGQINQAGLDFYNRLVDGLLEAGIKPFATLYHWDLPLALQADGGWPERSTAKAFVEYADVVSRALGDRVKSWITHNEPWCISMLSHQIGEHAPGWRDWQAALAAAHHVLLSHGWAVPELRRNSRDAEIGITLNFTPAEPASNSAADFKAYRQFDGYFNRWFLDPLYGRHYPADMVHDYIAQGYLPSQGLTFVEAGDLDAIATRTDFLGVNYYTREVVRSQEIPESENAPRTVLRAPQEEWTEMGWEVYPEGLYRLLNRLHFEYQPRKLYVTESGCSYSDGPGPNGRIPDQRRINYLRDHFAAAHQAIQCGVPLAGYFVWSFMDNFEWAKGYTQRFGIVWVDYQSQRRIPKDSAYWYRDVVAANAVQVPD

SEQ ID NO: 549 - DNA, 1404 bp, Unknown
  Obtained from environmental sample
atgaatcattccctttcatttccgccatcctttgtatggggcgcggcaaccgcaagctaccaactggaaggatcaacccaaggcgtggacggctgcgccgagtccgtctgggatatgcactgccgaagatccggcgcgatcaaggacggctcgaacggattcgtcgcctgcgatcactaccatcgctatcgcgaggatgtggcgctcatgaacgagcttggcttgaatgcctatcgattctcaatcatgtggccccgcgtcatgcccgaaggcaccggcgcggtgaacgagaagggcatggatttctacgatcggttggttgatgaactgctcgccgccggcatcacaccttgggttactttgttccactgggactttcccctagccttgttccaacgcggtggctggctgaatgcggattccccgcaatggtttgaggattacactcgggaagtggttaaacgcttgtcggatcgtgtgcatcactggctaacgctcaacgaaccggcgtgcttcattgagtttggccaccgtaccggcatgcatgcacccggcttgcaactggcggacaaggaagcctgccgggtctggcaccatgccatgctggcccacggtcgcgccgttcgcgctattcgccaggaatccgtgcatccatcaccccaggtcggctacgcgccggtcttccgcactaccatcccggacactgaagatcctgccgacatcgaagcggcccggacctcgatgtttgctcatcaggccggcaacctgttcgatacgcggtggaacctcgacccctgctttcggggcgcgtatccggagatcatgatgcagtattggggcgatgccgcgccgcgcatccaggacggcgacatggagttgatccgtcaggaactcgattttctcggcctgaatatttaccagtccgagcgcattcgggccggtgcggatggcgcacccgaggtggtgccataccctgcggattatccgcgcaaccagctcggttggcccatcacgccggaggccctgcgctgggcgaccctctttctctttgaggagtacgggaaacccctgatcatcacagaaaacggaatcaccctcgacgacaagcccaatgcagacggcgaggtgaatgatgtccagcggatcgcttttctgaatgactatcttagcggtctccagcgcagcgtggacgacggcatccctgtactgggctatttccactggtcgctgtgcgacaactttgagtgggcagaaggctatgtccctcgcttcggcctgatccatgtggactatgccagtcaacgcagaaccatcaaggcctcaggacggttttaccgcgacatcattcggggccagacagccacgccctgcatcgcccaatccagtcagccggaaacaacctaa

SEQ ID NO: 550 - protein, 467 aa, Unknown
  Obtained from environmental sample
  DOMAIN (3)...(454): Glycosyl hydrolase family 1
  SITE (2)...(5): N-glycosylation site. Prosite id = PS00001
  SITE (11)...(25): Glycosyl hydrolases family 1 N-terminal signature. Prosite id = PS00653
MNHSLSFPPSFVWGAATASYQLEGSTQGVDGCAESVWDMHCRRSGAIKDGSNGFVACDHYHRYREDVALMNELGLNAYRFSIMWPRVMPEGTGAVNEKGMDFYDRLVDELLAAGITPWVTLFHWDFPLALFQRGGWLNADSPQWFEDYTREVVKRLSDRVHHWLTLNEPACFIEFGHRTGMHAPGLQLADKEACRVWHHAMLAHGRAVRAIRQESVHPSPQVGYAPVFRTTIPDTEDPADIEAARTSMFAHQAGNLFDTRWNLDPCFRGAYPEIMMQYWGDAAPRIQDGDMELIRQELDFLGLNIYQSERIRAGADGAPEVVPYPADYPRNQLGWPITPEALRWATLFLFEEYGKPLIITENGITLDDKPNADGEVNDVQRIAFLNDYLSGLQRSVDDGIPVLGYFHWSLCDNFEWAEGYVPRFGLIHVDYASQRRTIKASGRFYRDIIRGQTATPCIAQSSQPETT

SEQ ID NO: 551 - DNA, 1230 bp, Unknown
  Obtained from environmental sample
gtgaccggcaccgtgccgaccggcttcctgtggggcgtggcgacggcgggccaccagaacgagggagacaacgtcaccagcgacacgtggttcctggagcacgtgcggcccacggtgttccgggagccgtccggcgcggcgtgcggatcgttccggctgtgggagaccgacctcgacctcgtcgcggcgatggggctgaccgcgtaccgcttctccgtcgagtgggcgcgggtcgagccggaggagggccggttctccgacgctgcgctggcgcactacgcggcggtggtcgacggctgcctggcccgcgggctggcgccgatcgtgacgctgaaccacttcaccgcgccgcactggttcgcctgccggggcggctggctggacccggacgcgccgcagctgttcgcgcgctacacggaccgggtgatggcccggttcggcgcccgcatgtcccacgtcgtcacgctgaacgagccgaacctgtcccgggtgctggcctggtccgggctgcccgacgtcgtcgccgagctggagcgcgcgacgctggcagcggcgtccgccgcggcgggcgtgccgcgctaccgggtcggcaacgtcgtgctgccggaggagtacgacgcgctggccgacggcatggcggcggcgcacgtcgcagcgaaggcggtcgtcaagcggcaccggccggacctgccggtcgggctgtcgctcgccgtcgtcgacgaccaggtcgcgggcgacgacgcggcgatacgagatcgcaagcggcgcgacgcctacgggcgctggctggacctcgtccgcgccgacgacttcgtcggggtgcagaactacgagcgcgtcgtgtacgacgcgcgcggccgggtcgagcgccccggcccgcgcaaccagatgggctcgctgatcgagccgggctcgctcgccggggcggtgcggtacgtgcacgaggcgaccggccgtcccgtgctggtgaccgagcacggcatcgccaccgccgacgacacgcagcgggtggcgttcctcgcgccggcgatcgaggggctgctggccgccgccgccgacggcgtgcccgtgctcgggtactgccactggacgctgctggacaacttcgagtggatcttcggctacgagcaccagttgggcttgcacgaggtcgaccgcgtcaccctcgcgcgcaccccgaagcccagcgcccacgagtacgcccgcctcgtcgccacccaccacccctga

SEQ ID NO: 552 - protein, 409 aa, Unknown
  Obtained from environmental sample
  DOMAIN (1)...(409): Glycosyl hydrolase family 1
  SITE (24)...(27): N-glycosylation site. Prosite id = PS00001
  SITE (162)...(165): N-glycosylation site. Prosite id = PS00001
MTGTVPTGFLWGVATAGHQNEGDNVTSDTWFLEHVRPTVFREPSGAACGSFRLWETDLDLVAAMGLTAYRFSVEWARVEPEEGRFSDAALAHYAAVVDGCLARGLAPIVTLNHFTAPHWFACRGGWLDPDAPQLFARYTDRVMARFGARMSHVVTLNEPNLSRVLAWSGLPDVVAELERATLAAASAAAGVPRYRVGNVVLPEEYDALADGMAAAHVAAKAVVKRHRPDLPVGLSLAVVDDQVAGDDAAIRDRKRRDAYGRWLDLVRADDFVGVQNYERVVYDARGRVERPGPRNQMGSLIEPGSLAGAVRYVHEATGRPVLVTEHGIATADDTQRVAFLAPAIEGLLAAAADGVPVLGYCHWTLLDNFEWIFGYEHQLGLHEVDRVTLARTPKPSAHEYARLVATHHP

SEQ ID NO: 553 - DNA, 1284 bp, Unknown
  Obtained from environmental sample
gtgaacaccgcgcatcgcatcgaattccctcggcaatttatcttcggttccgccactgctgctcaccaagtggagggcaacaacgttcacaatgattggtgggcccacgagcatgccaccgacacgaatgccgtggagccgtcgggcctcgcctgcgaccactttcggcgctttgccgacgacttccgcctcttacgccaactcggacagccagcgcaccgcctgtcgctggaatggagccgcatcgaaccggcacccggtgaaatcgatcgttcggcattgtcccactaccgccgagtcctgggtactttgcgagacctcggaatcgagccatgggtcaccatccaccacttcacttgccctcgctggttcgtggaacagggagggtttacacgcatggattcagcgcgctctctcgttcgccataccgaacgcgtggcgagggagttctccgacctagtcacaaactggtgcaccataaatgagccaaacgtcgtggcagaactcggttatcgcttcggatactttccgccgcggttgcaggacgatgagctggcagcggaagtgctcaccaacttctttcgcttacacgctgaaatggcagaagttttgcgcgctcacgcgcagagatcggcgcaaatcggtatcacccttgcgatgcaagcacacgagccgctgcgcatcgaaagcgaagcggaccgcgcactggcggcgcggcgcgacgccgagaccaacggcgtcatgctcaacgccttgcgaaccggtgtattcgcctacccgggacgggagccggtggaaatccctggactgaaaacgtcatcgaccttcgtgggggtccagtactattcgcgggtccgctacgacgccgagtcgcaaggtccagcaatgcccgacttcgagcgcaccctcagccaaatgggatgggaggtgtatcctgaggggttcggccccttgctcgagcgcgcagcagaaactggactcgaagtgatcgtcacagagaacgggatggcgcacgacgatgaccgtgtgcgcgtgcgttttatcgccgaccacttgcgggtcgttcaccgccttctggaacgcggtgtgcgcatcggagggtacttttactggtcgaccatggacaacttcgaatggaacttcgggtacggaccgaagttcggcctgatcgaagtggaccgttctaccctggaacgcaggccgcggcgaagcgcgtatttcttccgtgacatgatccagcagcgagtgctcgacgacgacctggtcgagcactggactcgctga

SEQ ID NO: 554 - protein, 427 aa, Unknown
  Obtained from environmental sample
  DOMAIN (5)...(417): Glycosyl hydrolase family 1
  SITE (334)...(342): Glycosyl hydrolases family 1 active site. Prosite id = PS00572
MNTAHRIEFPRQFIFGSATAAHQVEGNNVHNDWWAHEHATDTNAVEPSGLACDHFRRFADDFRLLRQLGQPAHRLSLEWSRIEPAPGEIDRSALSHYRRVLGTLRDLGIEPWVTIHHFTCPRWFVEQGGFTRMDSARSLVRHTERVAREFSDLVTNWCTINEPNVVAELGYRFGYFPPRLQDDELAAEVLTNFFRLHAEMAEVLRAHAQRSAQIGITLAMQAHEPLRIESEADRALAARRDAETNGVMLNALRTGVFAYPGREPVEIPGLKTSSTFVGVQYYSRVRYDAESQGPAMPDFERTLSQMGWEVYPEGFGPLLERAAETGLEVIVTENGMAHDDDRVRVRFIADHLRVVHRLLERGVRIGGYFYWSTMDNFEWNFGYGPKFGLIEVDRSTLERRPRRSAYFFRDMIQQRVLDDDLVEHWTR

SEQ ID NO: 555 - DNA, 1419 bp, Pyrococcus furiosus VC1
atgaagttcccaaaaaacttcatgtttggatattcttggtctggtttccagtttgagatgggactgccaggaagtgaagtggaaagcgactggtgggtgtgggttcacgacaaggagaacatagcatcaggtctagtaagtggagatctaccagagaacggcccagcatattggcacctctataagcaagatcatgacattgcagaaaagctaggaatggattgtattagaggtggcattgagtgggcaagaatttttccaaagccaacatttgacgttaaagttgatgtggaaaaggatgaagaaggcaacataatttccgtagacgttccagagagtacaataaaagagctagagaaaattgccaacatggaggcccttgaacattatcgcaagatttactcagactggaaggagaggggcaaaaccttcatattaaacctctaccactggcctcttccattatggattcatgacccaattgcagtaaggaaacttggcccggatagggctcctgcaggatggttagatgagaagacagtggtagagtttgtgaagtttgccgccttcgttgcttatcaccttgatgacctcgttgacatgtggagcacaatgaacgaaccaaacgtagtctacaatcaaggttacattaatctacgttcaggatttccaccaggatatctaagctttgaagcagcagaaaaggcaaaattcaacttaattcaggctcacatcggagcatatgatgccataaaagagtattcagaaaaatccgtgggagtgatatacgcctttgcttggcacgatcctctagcggaggagtataaggatgaagtagaggaaatcagaaagaaagactatgagtttgtaacaattctacactcaaaaggaaagctagactggatcggcgtaaactactactccaggctggtatatggagccaaagatggacacctagttcctttacctggatatggatttatgagtgagagaggaggatttgcaaagtcaggaagacctgctagtgactttggatgggaaatgtacccagagggccttgagaaccttcttaagtatttaaacaatgcctacgagctaccaatgataattacagagaacggtatggccgatgcagcagatagatacaggccacactatctcgtaagccatctaaaggcagtttacaatgctatgaaagaaggtgctgatgttagagggtatctccactggtctctaacagacaactacgaatgggcccaagggttcaggatgagatttggattggtttacgtggatttcgagacaaagaagagatatttaaggccaagcgccctggtattcagagaaatagccactcaaaaagaaattccagaagaattagctcacctcgcagacctcaaatttgttacaagaaagtag

SEQ ID NO: 556 - protein, 472 aa, Pyrococcus furiosus VC1
  DOMAIN (2)...(456): Glycosyl hydrolase family 1
  SITE (7)...(21): Glycosyl hydrolases family 1 N-terminal signature. Prosite id = PS00653
  SITE (373)...(381): Glycosyl hydrolases family 1 active site. Prosite id = PS00572
MKFPKNFMFGYSWSGFQFEMGLPGSEVESDWWVWVHDKENIASGLVSGDLPENGPAYWHLYKQDHDIAEKLGMDCIRGGIEWARIFPKPTFDVKVDVEKDEEGNIISVDVPESTIKELEKIANMEALEHYRKIYSDWKERGKTFILNLYHWPLPLWIHDPIAVRKLGPDRAPAGWLDEKTVVEFVKFAAFVAYHLDDLVDMWSTMNEPNVVYNQGYINLRSGFPPGYLSFEAAEKAKFNLIQAHIGAYDAIKEYSEKSVGVIYAFAWHDPLAEEYKDEVEEIRKKDYEFVTILHSKGKLDWIGVNYYSRLVYGAKDGHLVPLPGYGFMSERGGFAKSGRPASDFGWEMYPEGLENLLKYLNNAYELPMIITENGMADAADRYRPHYLVSHLKAVYNAMKEGADVRGYLHWSLTDNYEWAQGFRMRFGLVYVDFETKKRYLRPSALVFREIATQKEIPEELAHLADLKFVTRK

SEQ ID NO: 557 - DNA, 2160 bp, Cochliobolus heterostrophus ATCC 48331
atccctttcgatcagcgtgcttcgaaacgtgcagtgggcagttgggatgatgcatatacaaaggcaacagcagcactcgcaaagctatcgcaagatgaaaagattggaatcgtcacgggaactggctggtcgaagagtaattgtgtaggcaacaccaagcctgctagctcgattggataccccgagctatgtctgcaagatggtccccttggtgtccgctatgtccggggtataaccgcctttgcagctggcatccatgctgccagcacttgggacatcgatctcatccgtgaaagaggtgcttttctcggcaacgaagcaaaacaattgggtatccacgtacagctaggtccgtctgctggtccccttggcaagtttgccaagggcggccgtaactgggagggatttggatcagatccttatctccaaggcatcatgatggcacagaccattgagggcatgcaagaagctggtgttcaggccactgctaagcattggattgtgaatgaacaagagctcaaccgagacactatgagctctgatgtgagcgatagggtcctgcgcgagttgtatgtttggccattcgcggacgccgctcacagcaaggttgcggcattcatgtgcagctacaacaagctcaactcaacatgggcgtgtgaaagcgaaggcgttatgcaaaaactcttgaaagacgagcttggccaccgtggatacatcatgtcggattggaatgcgcaacacactacgactggcagtgcaaatggtggcatggacatgaccatgcccggcagtgattttagtggcggaaacgtgctctgggggccgcaactcaagacagccattagcaacggtcaagttcagcaatcacgcctcgatgatatggtcaagcgagtccttgctgcgtggtaccttatgggccaggacaagggttatcctgcgacttccttcaactcctggaacattggaacaaaacaaatcagtggaaaccacgggactaatgtccgagcgactgctcgagacggcactatcctgctgaagaatgctaatggtgcgctacccctgaagaagccaaagagcattgctgtcattggaactgacagtattgtcgcacctcgcggggccaatgcttgtgtcgaccgtggatgcaccgaaggtgttcttaccatgggctggggttcgggatcagttgagcttccatccaatatggtcgcgccactggatgccatcaagacgcaggcccaaaaagacggtacgacggttacttcgtcgcccaccgacaatgcccagcaaggcgccagcgcagctcaaaatgctgagattgccgtggtatgcatcaacagcaacgctggtgaaggctacatcaatgtggaaggcaacgctggcgaccgaaataacctagacccctggcacaatggcaatgagcttgtcaaggcggttgctgccgtgaacaagaagacggtggttgtcgttcacagcgttggaccaatcatcatggagcagtggattgagaatcccaacgtcgttgcagtagtgtgggcaggtctcccaggccaagagcccggcaacggcgttgtcgacatcatgtatggcgcagcgtcgccaagcggcaagcttccttacaccattgcgaagaaagagtctgactacggcaccacaattgccagtggcgatgacaagtcctgggatctgtacatcgactatcgctatttcgacaagcagaacatcacacccaggtttgaatttggctttggactctcatacaccaacttcacctactcagagctcaccgtaactggcaagccttctgctggtcctgcgactggtgctgtaggacctggaggccccgttgatctcttcgagactgtcgctacagtcaccgccaagattgccaactctggtggtgttgctggtgccgaggtaccgcagctgtatctgggctaccctgcgtctaccaactctccaccaaaacaactcaggggcttcagcaagctcaagttggaggctggtgctagcggaaccgcaacattcaagctgaggaggagggacatgagtttctgggacgagaagaccaggaagtggactgttgcgacgggcgagtacactgtctttgtcggagcaagctccagggacgtgaggctgacgggcaagattgttgtgtaa

SEQ ID NO: 558 - protein, 719 aa, Cochliobolus heterostrophus ATCC 48331
  DOMAIN (52)...(262): Glycosyl hydrolase family 3 N terminal domain
  DOMAIN (342)...(589): Glycosyl hydrolase family 3 C terminal domain
  SITE (217)...(220): N-glycosylation site. Prosite id = PS00001
  SITE (598)...(601): N-glycosylation site. Prosite id = PS00001
IPFDQRASKRAVGSWDDAYTKATAALAKLSQDEKIGIVTGTGWSKSNCVGNTKPASSIGYPELCLQDGPLGVRYVRGITAFAAGIHAASTWDIDLIRERGAFLGNEAKQLGIHVQLGPSAGPLGKFAKGGRNWEGFGSDPYLQGIMMAQTIEGMQEAGVQATAKHWIVNEQELNRDTMSSDVSDRVLRELYVWPFADAAHSKVAAFMCSYNKLNSTWACESEGVMQKLLKDELGHRGYIMSDWNAQHTTTGSANGGMDMTMPGSDFSGGNVLWGPQLKTAISNGQVQQSRLDDMVKRVLAAWYLMGQDKGYPATSFNSWNIGTKQISGNHGTNVRATARDGTILLKNANGALPLKKPKSIAVIGTDSIVAPRGANACVDRGCTEGVLTMGWGSGSVELPSNMVAPLDAIKTQAQKDGTTVTSSPTDNAQQGASAAQNAEIAVVCINSNAGEGYINVEGNAGDRNNLDPWHNGNELVKAVAAVNKKTVVVVHSVGPIIMEQWIENPNVVAVVWAGLPGQEPGNGVVDIMYGAASPSGKLPYTIAKKESDYGTTIASGDDKSWDLYIDYRYFDKQNITPRFEFGFGLSYTNFTYSELTVTGKPSAGPATGAVGPGGPVDLFETVATVTAKIANSGGVAGAEVPQLYLGYPASTNSPPKQLRGFSKLKLEAGASGTATFKLRRRDMSFWDEKTRKWTVATGEYTVFVGASSRDVRLTGKIVV

SEQ ID NO: 559 - DNA, 1431 bp, Unknown
  Obtained from an environmental sample
atgaaaactaattatagatttggagggattaaaatgttttctaaagactttttatttggagcatctttgtctggatttcagtttgaaatgggaaatccaaataatgaagaggaattagacaaaaacacagattggtttgtttgggtaagagacttaggaaatataattaatggaaaagttagtggagatcttcctgaatatggtgcaggatattatactaattacaaggcagttcacaatcttgcaaaagaatttggaatgaatgctttaagaattggaatagaatggtcaagaatttttaaagaaagcacaaaagatattagcccagatgatcctaacatgttagaaaaacttgatcaactagctgataaaaaggcgattgaacattatagagatgtattagaagacataaaaagtaaaggacttgtagctattgttaatttgtcgcactttactttaccactttggcttcatgatccaataaatgtacacaaaggaaaggaaacaaaaaagcttggttgggtaagtgatgatgcaccaatagaatttgctaaatacgcagaatacatcgcatggaaatttaaagatattgttgatatgtggtcttcaatgaatgaacctcacgtggtaagtcagcttggttattttcaaacaagtgcaggttttccaccaagctattttaatccttcatggtatctaaaaagtcttgaaaatcaagctttagcacataaccttgcttatgatgctataaaaaaacatacagacaagccagttggagttatttattcatttacgtggtatgatacagttaataatgatgaagaaatattcgaaagtgcaatgtttttaaataactggaattatatggatagagtaaaggataaaattgactttgtaggtgtaaattattatacaagggctgttatagaccgacttttggttcctataaaaattgataattatgaattaaattggtatactcttagtggttatgggtattcatgtgttgaagatggttttgcaaattcaaaaagaccttcaagcgaaattggttgggagatatatccagaagggctttataatattctcaaagaaatatacaatagatatggaaagcaaatctatataacggaaaatggtatagcagattcaagcgataaatacagaagcttttatattatttcccacctttatgcagtagaaaaagcaataaacgaaggagtaccagtaaaaggataccttcactggtcaataatagataattatgaatgggcaaaaggttatggtaaaagatttggacttgcctatacagattttgaaagaaaaacttatattccaagaccttctatgtatattttaagagaaataataaaagaaagaactattgataagtttaaaggatatgatccgtacggattaatgaatttttga

SEQ ID NO: 560 - protein, 476 aa, Unknown
  Obtained from an environmental sample
  DOMAIN (9)...(462): Glycosyl hydrolase family 1
  SITE (17)...(31): Glycosyl hydrolases family 1 N-terminal signature. Prosite id = PS00653
  SITE (149)...(152): N-glycosylation site. Prosite id = PS00001
  SITE (379)...(387): Glycosyl hydrolases family 1 active site. Prosite id = PS00572
MKTNYRFGGIKMFSKDFLFGASLSGFQFEMGNPNNEEELDKNTDWFVWVRDLGNIINGKVSGDLPEYGAGYYTNYKAVHNLAKEFGMNALRIGIEWSRIFKESTKDISPDDPNMLEKLDQLADKKAIEHYRDVLEDIKSKGLVAIVNLSHFTLPLWLHDPINVHKGKETKKLGWVSDDAPIEFAKYAEYIAWKFKDIVDMWSSMNEPHVVSQLGYFQTSAGFPPSYFNPSWYLKSLENQALAHNLAYDAIKKHTDKPVGVIYSFTWYDTVNNDEEIFESAMFLNNWNYMDRVKDKIDFVGVNYYTRAVIDRLLVPIKIDNYELNWYTLSGYGYSCVEDGFANSKRPSSEIGWEIYPEGLYNILKEIYNRYGKQIYITENGIADSSDKYRSFYIISHLYAVEKAINEGVPVKGYLHWSIIDNYEWAKGYGKRFGLAYTDFERKTYIPRPSMYILREIIKERTIDKFKGYDPYGLMNF

SEQ ID NO: 561 - DNA, 1350 bp, Unknown
  Obtained from environmental sample
atgtcagatgccgccccgactgatccgaaatccgcaatgcccagacgctcggacttccccgagggttttgtcttcggcgcggccaccgcggcctatcagatcgagggccatgccttcggcggcgcgggcccctgccattgggacagcttcgccgcaaccgggcgtaacgtggtcggcaatgaggatggcgcgcgcgcctgcgagcattacacccgctggccgcaggatctggacctgatccgcgaggccgggctcgacgcctaccgcttctcgacctcctgggcgcgggtgatgcccgatggcgtgaccctgaaccccgaggggctggatttctacgaccgcctcgtcgatggcatgctcgagcgcgggctaaagccctatctcaccctctaccattgggaattgccctcggcgcttgccgacaggggcggctggaccaatcgcgacacggccgagcgctttgccgatttcgcagcggtggtgatggagcggttgggcagccgcgtcgcccgcacggccaccatcaacgagccatggtgcgtgagctggctctcgcatttcgaaggccatcacgcgccgggcctgcgcgacatccgtgccaccgcacgcgccatgcatcatgtgcaactggcgcacggcctcgcgctcgggaagctgcgcgcgcaggggcatggcaatctcggcatcgtgctgaatttctcggaaatcattcccgccgggcgagagcacgcgaaggcggctgatctcggcgacgcaatctcgaaccgctggttcatcgagtcagtcgcgcgtggcacctatcccgatgtggtcctcgagggtctgggcaagcacatgcccgagggctggcaggatgacatgaaaaccatcgcggccccgctcgactggctgggtgtgaactactacacccgcggcatcgtcgcgcatgacccggacgcgtcctggccctcgacccgagcggaggaggggcccctgcccaagacgcagatgggctgggagatctaccccgagggcttgcgcaacctgctggtgcgcatggcgcgcgactatgtgggcgaccttcccatggtcgtgaccgaaaacgggatggcctgggccgacgaggtcgcggatggcgccgtcagagatacgatccgcaccgaatatgtcgcagcccatctcaacgcgacccgcgaggcgctggccggcggggcgaatatcgaaggtttcttctattggtcgctgctcgacaattacgaatgggccttcggctatgccaagcgcttcggcctcgtccatgtcgatttcgacacgatggcacgcacgccgaaagcctcctaccacgcgctgagggccgcgctgcagggttga

SEQ ID NO: 562 - protein, 449 aa, Unknown
  Obtained from environmental sample
  DOMAIN (15)...(443): Glycosyl hydrolase family 1
  SITE (235)...(238): N-glycosylation site. Prosite id = PS00001
  SITE (361)...(369): Glycosyl hydrolases family 1 active site. Prosite id = PS00572
  SITE (393)...(396): N-glycosylation site. Prosite id = PS00001
MSDAAPTDPKSAMPRRSDFPEGFVFGAATAAYQIEGHAFGGAGPCHWDSFAATGRNVVGNEDGARACEHYTRWPQDLDLIREAGLDAYRFSTSWARVMPDGVTLNPEGLDFYDRLVDGMLERGLKPYLTLYHWELPSALADRGGWTNRDTAERFADFAAVVMERLGSRVARTATINEPWCVSWLSHFEGHHAPGLRDIRATARAMHHVQLAHGLALGKLRAQGHGNLGIVLNFSEIIPAGREHAKAADLGDAISNRWFIESVARGTYPDVVLEGLGKHMPEGWQDDMKTIAAPLDWLGVNYYTRGIVAHDPDASWPSTRAEEGPLPKTQMGWEIYPEGLRNLLVRMARDYVGDLPMVVTENGMAWADEVADGAVRDTIRTEYVAAHLNATREALAGGANIEGFFYWSLLDNYEWAFGYAKRFGLVHVDFDTMARTPKASYHALRAALQG

SEQ ID NO: 563 - DNA, 1389 bp, Unknown
  Obtained from environmental sample
atgagcgctccgagtcccgcccgccccgtgtcctttcctccccgcttcgtgtggggagccgcggccgcatcctatcaaatcgagggcgccgtccgggaggacggcaagggcccttcggtgtgggacatgttctgcgagaagccgggagccgtcttcgaggggcacgacggggcggtggcttgcgatcactaccaccgttaccgggaagacgtggccctgatgcggcagattgggctccaggcttaccgcctgagcgtgtgctggcccagggtgctgcccgaggggaccgggcagcccaacgagaaggggctcgacttctactcccggctcgtcgacgccttgctcgaggcggggatcacgccttgggtcaccctttttcactgggactacccactagccctatatcaccggggaggctggctcaatcgggatagctcagactggttcggcgagtacgcgggtctgattgcggagcgcctctccgatcgggtgagccacttcttcacccagaacgagccccaggtgtacatcggcttcgggcacctcgaggggaaacacgcgccgggcgatacccttcccctgtcgcagatgctgctggccggtcaccacagcctgctcgcccatggaaaggccgtgcaggcgctgcgcgcccacggcaagcagcagctgcgggttggatacgctccggtggggatgccgctgcatccggtcagcgagtccgccgaagacgtggcggctgcacgcaccgccactttccgcgtccgagagaagaattcctggaacaacgcttggtggatggacccggtgtacctcggtgagtaccccgcccaagggctcgagttctacgggcgagacgtccccgcgatccggtccggagacatggaactcatccggcaacccttggactttttcggcgtcaacatctaccagagcacgcccgtgcgcgccgcgggggcgccccaggggttcgaggtcgtccggcatccgacgggccaccccatcaccgcgttcaactggccggttacgccacaggccttgtattgggggccgcggttcttctacgagcgctatggcaagcccatcgtcattacggaaaacgggctttcctgccgagacgtgatcgcccttgacggcaaggtgcacgatccgtcccgcatcgacttcaccacgcgctacctgcgcgagctccaccgcgccatcgccgaaggcaacgaggtggagggctacttccactggtccatcatggacaacttcgaatgggctgccggataccgagaacgcttcgggctcgttcacgtggattacgagaccctggtgaggacacccaaggactctgcggcgtggtaccgccaggtcatccagagcaacggggccgtgctgttcgattga

SEQ ID NO: 564 - protein, 462 aa, Unknown
  Obtained from environmental sample
  DOMAIN (8)...(458): Glycosyl hydrolase family 1
  SITE (16)...(30): Glycosyl hydrolases family 1 N-terminal signature. Prosite id = PS00653
  SITE (366)...(374): Glycosyl hydrolases family 1 active site. Prosite id = PS00572
MSAPSPARPVSFPPRFVWGAAAASYQIEGAVREDGKGPSVWDMFCEKPGAVFEGHDGAVACDHYHRYREDVALMRQIGLQAYRLSVCWPRVLPEGTGQPNEKGLDFYSRLVDALLEAGITPWVTLFHWDYPLALYHRGGWLNRDSSDWFGEYAGLIAERLSDRVSHFFTQNEPQVYIGFGHLEGKHAPGDTLPLSQMLLAGHHSLLAHGKAVQALRAHGKQQLRVGYAPVGMPLHPVSESAEDVAAARTATFRVREKNSWNNAWWMDPVYLGEYPAQGLEFYGRDVPAIRSGDMELIRQPLDFFGVNIYQSTPVRAAGAPQGFEVVRHPTGHPITAFNWPVTPQALYWGPRFFYERYGKPIVITENGLSCRDVIALDGKVHDPSRIDFTTRYLRELHRAIAEGNEVEGYFHWSIMDNFEWAAGYRERFGLVHVDYETLVRTPKDSAAWYRQVIQSNGAVLFD

SEQ ID NO: 565 - DNA, 1347 bp, Unknown
  Obtained from environmental sample
atgactgaccatcgttttccaaaaggattcatctggggaaccgctacggcgtctttccagattgaaggcgccacccgcgaagatggccggggcgaatccatctgggaccgcttctgcgccacgccggggaaaattgtcacgggcgaaaccggcgatcctgcctgcgactcctatcatcgttaccctgaagacatcgccctgatgaaggctatgtcgctcaatggttaccgcttttcaatcgcctggcctcgcgtcattcctgacggagacggtaaagtctgtcaggccgggctcgactactacgatcgtgtggtagatgctctcctggcggagaatatccaaccttttatcaccctgtaccactgggacctgccccaggcattacaggatcggggtggctggggcaaccgtgccacggttgaggcgttcactcgctacgtagatattgtggtttctcgcctgggtgaccgcgtaaagtactggatgacacacaacgaaccctggtgtgtatccattttgagccatgagcttggtgaacatgcccccgggttgaaggaccgaaaactggccctccaggtggcgcaccatgtcctcgtttctcacggcctggccgtgcccatcatccgccagcgttgtaaagaggcgcaggttggcatcgtgttgaatttttcacctgcttacccggccaccgatagcctggccgaccagatggccacccgtcagcaccacgcccggtttaacctctggttcctcgatcccatcgccgggcgcggctacccgcaggatgcctgggaagggtacggagccgatgttcccgccatgaggcctgatgacatgcagatcatcgccgcccccatcgacttcctgggcgtcaatttctacagtcgggcggtctgccacgatccggccgggggcgaaggttcccgggtgctcaatgtgcgcagtaaaaccgaggccaccgatcgagactgggagatttaccctcaggcgctctacgatttactcatctggatccacaatggataccagttcagagatatttacattaccgagaatggcgcctcatacaacgatgtggtctccccggatgggaaagtgcacgatcctaaacgtctggactatctgaaacgccatctggccatggctctgcgggccatcgaagcgggcgttccactgcgtggttatttctgctggagcttgatggacaacttcgaatgggccatgggcaccagcagccgattcgggttggcctacaccgacttcactacccagaagcgtattctcaaagacagtgggctctggtttggcgaagtggcacgggcaaacgccttaatcgaccttccctga

SEQ ID NO: 566 - protein, 448 aa, Unknown
  Obtained from environmental sample
  DOMAIN (2)...(444): Glycosyl hydrolase family 1
  SITE (10)...(24): Glycosyl hydrolases family 1 N-terminal signature. Prosite id = PS00653
  SITE (352)...(360): Glycosyl hydrolases family 1 active site. Prosite id = PS00572
MTDHRFPKGFIWGTATASFQIEGATREDGRGESIWDRFCATPGKIVTGETGDPACDSYHRYPEDIALMKAMSLNGYRFSIAWPRVIPDGDGKVCQAGLDYYDRVVDALLAENIQPFITLYHWDLPQALQDRGGWGNRATVEAFTRYVDIVVSRLGDRVKYWMTHNEPWCVSILSHELGEHAPGLKDRKLALQVAHHVLVSHGLAVPIIRQRCKEAQVGIVLNFSPAYPATDSLADQMATRQHHARFNLWFLDPIAGRGYPQDAWEGYGADVPAMRPDDMQIIAAPIDFLGVNFYSRAVCHDPAGGEGSRVLNVRSKTEATDRDWEIYPQALYDLLIWIHNGYQFRDIYITENGASYNDVVSPDGKVHDPKRLDYLKRHLAMALRAIEAGVPLRGYFCWSLMDNFEWAMGTSSRFGLAYTDFTTQKRILKDSGLWFGEVARANALIDLP

SEQ ID NO: 567 - DNA, 1620 bp, Unknown
  Obtained from environmental sample
atgtttaaaaattattttatacttaacagacttgttgtagaattaaacaaagaagtaaaagactttgaagtaattcgtgcattttcctacgaaaaagataaaattgcttttattctcaggaaaaagctagatgaattaagtattgaaatatcagttaatccgggatttccatatttaagtttgcgaaatagattttcaattccacgaaaaaaccttgttgatttctttagttcatacttacccctaaaaattatttcatttggaatttcagatagagatagagtcataaaaataaatctggataaagcatccatttattttacaatcagaggaaaatatactaatgtctttttaatatcgaatgaagctgaaatggagaactttaaaaaaaccgatgaatcagttttaaaagacttcaaatatgaagctgagaatcagcattttattcatgaatttaacgaattgcaatttattgaaaagtttgttgaacctgagttagttagaaagaaatatccaatcattggtaaagaaataattaatgaagtaaaaattagagcagaaaatgctgatgtctccacatctctgttattaaaagtaatcactgaagtaaatgaaaaagatcctgctgtttttattgatgagaatacaaatgaagttaatttaggaattgaaacgtttaatgtatttccattcaccaaaaaagaaatattttcaaacctgattgaagcatttaattattttcttaatcagaaattttccagagaaagtatttttgataaaaagaagataattgaaaagtatcttgagaatggattaaataaagtctcagctaaattaaatgatgttcaatccagaattcaaaggggtacgaaagaggaagagtataataaaatagctaatcttcttttaatcaatattaataattttactaaaggtaagaatagtgttgaactacaggatatttataaagagaattccttcgtttcaataaaattggatactaaattatctccaaagcaaagtgttgattcatattttgaaaaagcaagaaacgaaaaaataaaatttgaaaaatccaggcagctctactccgagcatcagaaaaaatattctgaattacaaaggattaaaggaaaatttttaaaagctaaaataacagaagaatatgatttaattatgaaagaattaaatattaagcaggaagtaaaaaccaaacctcaggatgatttaaaggataaattcagacattatttagtccacaagaaatacaatgtttatgtaggaaaagacagcaaaagtaatgatctcttaactatgaaatttgcaaaacagaatgattattggtttcatgccagagggctttcagggtctcacgtagttcttaagaatgaaaatgctaaagaaggaataccaaaaaatatattaaaagctactgcatcattggcagcctatcatagtaaagcaaaaaccgcaggaatggcacctgtttcttacacacaaaaaaaatatgtaataaaaaagaaaggtatggaacccggcaaagttgccttgctgaaagaagaggttttaatcgttaagccggtaattcctgtagagtgcgagtatattagtgttgaatga

SEQ ID NO: 568 - protein, 539 aa, Unknown
  Obtained from environmental sample
  DOMAIN (1)...(406): Fibronectin-binding protein A N-terminus (FbpA)
  DOMAIN (417)...(506): Domain of unknown function (DUF814)
  SITE (312)...(315): N-glycosylation site. Prosite id = PS00001
  SITE (329)...(332): N-glycosylation site. Prosite id = PS00001
MFKNYFILNRLVVELNKEVKDFEVIRAFSYEKDKIAFILRKKLDELSIEISVNPGFPYLSLRNRFSIPRKNLVDFFSSYLPLKIISFGISDRDRVIKINLDKASIYFTIRGKYTNVFLISNEAEMENFKKTDESVLKDFKYEAENQHFIHEFNELQFIEKFVEPELVRKKYPIIGKEIINEVKIRAENADVSTSLLLKVITEVNEKDPAVFIDENTNEVNLGIETFNVFPFTKKEIFSNLIEAFNYFLNQKFSRESIFDKKKIIEKYLENGLNKVSAKLNDVQSRIQRGTKEEEYNKIANLLLININNFTKGKNSVELQDIYKENSFVSIKLDTKLSPKQSVDSYFEKARNEKIKFEKSRQLYSEHQKKYSELQRIKGKFLKAKITEEYDLIMKELNIKQEVKTKPQDDLKDKFRHYLVHKKYNVYVGKDSKSNDLLTMKFAKQNDYWFHARGLSGSHVVLKNENAKEGIPKNILKATASLAAYHSKAKTAGMAPVSYTQKKYVIKKKGMEPGKVALLKEEVLIVKPVIPVECEYISVE

SEQ ID NO: 569 - DNA, 1350 bp, Unknown
  Obtained from environmental sample
atgttagatgccacctctactgaccccaaatccgccatgccaaagcgcggcgattttccggccggttttacctttggcgccgccaccgccgcctatcagatcgaagggcatcaattcggcaatgcagggtccagccattgggacaccttcgccgcgacaggcaagaatgtcgtcggcaatgaaaacggcgcgcgcgcctgcgaacattacctgcggtgggagggcgatctggacctgatccgcgatgcaggctttgacgcctaccgcttttccacatcctgggcgcgggtcatgcccgatggcgtgacgatcaacgaagaggggctggatttctacgataaactggtcgatggcatgatcgcgcgcgggctgacgccctatctgacgctgtatcactgggacctgccatcggcgctggcggatcaaggcggctggaccaaccgcgccacagctgaacgtttcgccgattacgccgccgccgtgatggaccggatcggcgaccgcgtcgcgcgcaccgccaccatcaacgagccttggtgcgtcagctggctgtcgcattttgagggccaccacgcccccggcctgcgcgatatccgcgctgccgcgcggtcgatgcaccatatccagctggcacatggtctggcgatgcacaaactgcgcgccgcagggcataaaaaccttggcatcgtgctgaatttctctgaaatcctgcccgcgcaggaaggcgaagatgcggctgtcgatatttctgacgcgatctcgaaccgctggtttatcgaaagtgtcgccaaaggcacctatccgcagatcgtgctggatggtctgggccaacatatgccgcaaggctggcaggatgacatggcgatcatcgcggcccccatcgactggctgggcgtgaattactattcccgcgccatcgtgtcagccgatcccgcggcaccctggccctctacccgcgggcatgaggggcctttgcccaaaacccagatgggttgggaaatctacccagacggattgcgcaatctgctgatccgcatggcgcaagattacgtgggtgatctgcccatcgttgtcaccgaaaacggcatggcctgggatgatcatgtgcaggatggcgccgtcgccgatgacatccgctgcaattacgtcgccagccaccttgccgccacgcgcgcggcgattgcaggcggggccaatgtgcagggcttcttctattggtcgctgatggataattacgaatgggcctttggctatgccaaacgctttggtctggtccatgtcgatttcgacacgatggaacggacgccaaaagcatcctatcacgcgctgaaagcggcgattgcaaaataa

SEQ ID NO: 570 - protein, 449 aa, Unknown
  Obtained from environmental sample
  DOMAIN (15)...(449): Glycosyl hydrolase family 1
  SITE (235)...(238): N-glycosylation site. Prosite id = PS00001
  SITE (361)...(369): Glycosyl hydrolases family 1 active site. Prosite id = PS00572
MLDATSTDPKSAMPKRGDFPAGFTFGAATAAYQIEGHQFGNAGSSHWDTFAATGKNVVGNENGARACEHYLRWEGDLDLIRDAGFDAYRFSTSWARVMPDGVTINEEGLDFYDKLVDGMIARGLTPYLTLYHWDLPSALADQGGWTNRATAERFADYAAAVMDRIGDRVARTATINEPWCVSWLSHFEGHHAPGLRDIRAAARSMHHIQLAHGLAMHKLRAAGHKNLGIVLNFSEILPAQEGEDAAVDISDAISNRWFIESVAKGTYPQIVLDGLGQHMPQGWQDDMAIIAAPIDWLGVNYYSRAIVSADPAAPWPSTRGHEGPLPKTQMGWEIYPDGLRNLLIRMAQDYVGDLPIVVTENGMAWDDHVQDGAVADDIRCNYVASHLAATRAAIAGGANVQGFFYWSLMDNYEWAFGYAKRFGLVHVDFDTMERTPKASYHALKAAIAK

SEQ ID NO: 571 - DNA, 1404 bp, Unknown
  Obtained from environmental sample
atgaatcattctctttcatttccgccatcctttgtatggggcgcagcaaccgcaagctaccaactggaaggatcaacccagggcgtggacggctgcgccgagtccgtctgggatatgcactgccgcagatccggcgcgatcaaggacggctcgaacggattcgtcgcctgcgatcactaccaccgctatcgcgaggatgtggcgctcatgaacgagcttggcttgaatgcctatcgattctcaatcatgtggccccgcgtcatgcccgaaggcaccggcgcggtgaacgagaagggcatggacttctacaatcggttggttgatgaactgctcgccgccggcatcactccttgggttactttgttccactgggactttcccctagccttgttccaacgcggtggctggctgaatgcggattccccgcaatggtttgaggattacacccgggaagtggttaaacgcttgtcggatcgcgtgcatcactggctgacgctcaacgaaccggcctgcttcattgagtttggccaccgtaccggcatgcatgcacccggcttgcaactggcggacaaggaagcctgccgggtctggcaccatgccatgctggcccacggtcgcgccgttcgcgctatccgcgaggaatccgtgcatccatcaccccaggttggctacgccccggtcttccgtaccaccatcccggacactgaagatcctgccgacatcgaagcggcccgggcctcgatgtttgcccatcaggccggcaacctgttcgatacgcggtggaacctcgccccctgctttcggggcgcgtatccggagatcatgatgcagtattggggcgatgccgcgccgcgcatccaggacggcgacatggagttgatccgtcaggaactcgattttctcggcttgaatatttaccagtccgagcgcattcgagccggtgcggatggcgcacccgaggtggtgccataccctgcggattatccgcgcaaccagctcggttggcccatcacgccggaggccctgcgctgggcgaccctctttctctttgaggagtacgggaaacccctgatcatcacagaaaacggaatcaccctcgacgacaagcccaatgcagacggcgaggtgaatgatgtccagcggatcgcttttttgaacgactatcttagcggtctccagcgcagcgtggacgacggcatccctgtactgggctatttccactggtcgctgtgcgacaactttgagtgggcagaaggctatgtccctcgcttcggcctgatccatgtggactatgccagtcaacgcagaaccatcaaggcctcaggacggttttaccgcgacatcattcggggccagacagccacgccctgcatcgcccaatccagtcagccggaaacaacctaa

SEQ ID NO: 572 - protein, 467 aa, Unknown
  Obtained from environmental sample
  DOMAIN (3)...(454): Glycosyl hydrolase family 1
  SITE (2)...(5): N-glycosylation site. Prosite id = PS00001
  SITE (11)...(25): Glycosyl hydrolases family 1 N-terminal signature. Prosite id = PS00653
MNHSLSFPPSFVWGAATASYQLEGSTQGVDGCAESVWDMHCRRSGAIKDGSNGFVACDHYHRYREDVALMNELGLNAYRFSIMWPRVMPEGTGAVNEKGMDFYNRLVDELLAAGITPWVTLFHWDFPLALFQRGGWLNADSPQWFEDYTREVVKRLSDRVHHWLTLNEPACFIEFGHRTGMHAPGLQLADKEACRVWHHAMLAHGRAVRAIREESVHPSPQVGYAPVFRTTIPDTEDPADIEAARASMFAHQAGNLFDTRWNLAPCFRGAYPEIMMQYWGDAAPRIQDGDMELIRQELDFLGLNIYQSERIRAGADGAPEVVPYPADYPRNQLGWPITPEALRWATLFLFEEYGKPLIITENGITLDDKPNADGEVNDVQRIAFLNDYLSGLQRSVDDGIPVLGYFHWSLCDNFEWAEGYVPRFGLIHVDYASQRRTIKASGRFYRDIIRGQTATPCIAQSSQPETT

SEQ ID NO: 573 - DNA, 2457 bp, Unknown
  Obtained from environmental sample
atgtcagagacaattgaccggttgctggcggagatgacgctggaggaaaagatcaagctgctgggcggttggcgcgcggtaccaggtacgccgcgggacgcagacgtatatggcgtaccccgtctagggatagccccactcagattggcggacggtccgaccggggtccattggtggaccaaggcatcgacctgttacccggccctgattaatttggcggcttcttttgatgaaaagattgcctacacattcggacgcgcactgggaaccgattgccgtgctttcggggtacatgtgatcctcgctcccggtgtaaacctgtaccgctctccattatgtggacggaacttcgaatatctcggagaggacccggaattggccggaggactggccgcagcctacatccgtggtttgcaatcaaaaggagtggctgctaccgtcaaacacctggcagccaataatcaggaatacgatcgtcacaatatcagctcggatattgacgagcgcaccttgcgcgaagtctacctacgcccctttgaaagggctgtccatgaagggcaaacggcagcagtcatgacggcatataatccggtcaatggacagcatgcctcggaaaatgcctggctgctggatggcgtgttgcgccacgattggggcttcaacgggtggattatgtcggattggacatccgtctattccacagtgcagactttgaatagcgggttggatctggaaatgccgtttgccttgcacctgacggaagaaaaaatcaaagctgctttggcgaccggggtcacgactgtcacccgcatcgatcgcatggtactgcaccgattggcactgatggagcgcttcgggtggttggatcccgggcatgcacagcaggataagtcattgcccgaccgtaaccccgaaaccgaagccgtggctttggaggtggcacgccgcggcattgtactgcttaagaatcgaaaccatgtcttgccctgtccgcctgccagcctgcgccgcatcgtcgtgctggggcatcacgcagcccaacccattctgtccgggggcggttcagccttctgcccgccgcacgaatcggtaaccctgctggaggcactgcgccagacatacgcgcaggatgtgcaggtggattatttcgagatggtagatccgtggtgcgaacgggctgctttggaagcgagtagcttttatacggctgatggcgaaccgggcttgcatgcctgctactttgccaataatcgcctggaaggctcccctgccctcgagcgggtggataccaaactgcaattccgttggatttctgaaaaaccggatccaatgctggaagatgattatttttcggcacgctggagcggctttttcgatattgatgctgccggtatctacgactggtatctgaaaagcgaagacgggacatttcaggtatgggtggatgatcatcccctgacggatccctttacaggcacgcggcgtgttcctcttgatctgtctgcgggacaacatcggataactgtcacctattgccagttgcgcggcggatgggccacctgccaatgtggctttgaacgcgcagctaatgcgcttcgtgcatatgaggacggtctggctgcagcagccgaagcagatcttgtggtggttacaaccggttttgtggcacccacggaacgggaatccagtgaccgcacatttgaattggatcagcgcctgaatcaaatggtcctcgatgtagccagacagaatgcgcgcacggttgttgttttgtatgcaggtggcgccgtggatgtggcaccgtggatcgatcaggttgcggctttgttgcatatctggtatcccggtcaaaacggtacgctggcagcagccgagataattgccggatacactaacccatcgggcaaattacctttcacatgggaacatcaactctctgaccgcggttcctttagcgcatatcatgatgacgatggggatggccgcgtggcttacacagatggtgtttttaccggatatcgatggttcgaccatcaccggataaaagcacgctatccatttggattcggcttgtcatacactacatttgcctatgaaaatcttgcctgtactcctgctacgttgcaggagaacgaaacggtccaagtaacgttcgacgtgatcaacaccggcagcgtggccggacgacatgctgcgctagtctttgtggctccgcctgcgggtacggttccgagacccgtaaaggaatacaagcaatcgtgcgtggttaatctagcacctggtgaacggcagtccgtcactgtcaccttgccatggcgcgccttccagttttggcatccagatacacgatgctggagcatcaccccgggtgcacatgcaattcaagtccgaccggacgccgatagcacggggctgcaagctgaagtcacactggtggatggacacgccaaacgatga

SEQ ID NO: 574 - protein, 818 aa, Unknown
  Obtained from environmental sample
  DOMAIN (36)...(247): Glycosyl hydrolase family 3 N terminal domain
  DOMAIN (318)...(695): Glycosyl hydrolase family 3 C terminal domain
  DOMAIN (405)...(539): PA14 domain
  SITE (15)...(27): Lipocalin signature. Prosite id = PS00213
  SITE (163)...(166): N-glycosylation site. Prosite id = PS00001
  SITE (627)...(630): N-glycosylation site. Prosite id = PS00001
  SITE (721)...(724): N-glycosylation site. Prosite id = PS00001
MSETIDRLLAEMTLEEKIKLLGGWRAVPGTPRDADVYGVPRLGIAPLRLADGPTGVHWWTKASTCYPALINLAASFDEKIAYTFGRALGTDCRAFGVHVILAPGVNLYRSPLCGRNFEYLGEDPELAGGLAAAYIRGLQSKGVAATVKHLAANNQEYDRHNISSDIDERTLREVYLRPFERAVHEGQTAAVMTAYNPVNGQHASENAWLLDGVLRHDWGFNGWIMSDWTSVYSTVQTLNSGLDLEMPFALHLTEEKIKAALATGVTTVTRIDRMVLHRLALMERFGWLDPGHAQQDKSLPDRNPETEAVALEVARRGIVLLKNRNHVLPCPPASLRRIVVLGHHAAQPILSGGGSAFCPPHESVTLLEALRQTYAQDVQVDYFEMVDPWCERAALEASSFYTADGEPGLHACYFANNRLEGSPALERVDTKLQFRWISEKPDPMLEDDYFSARWSGFFDIDAAGIYDWYLKSEDGTFQVWVDDHPLTDPFTGTRRVPLDLSAGQHRITVTYCQLRGGWATCQCGFERAANALRAYEDGLAAAAEADLVVVTTGFVAPTERESSDRTFELDQRLNQMVLDVARQNARTVVVLYAGGAVDVAPWIDQVAALLHIWYPGQNGTLAAAEIIAGYTNPSGKLPFTWEHQLSDRGSFSAYHDDDGDGRVAYTDGVFTGYRWFDHHRIKARYPFGFGLSYTTFAYENLACTPATLQENETVQVTFDVINTGSVAGRHAALVFVAPPAGTVPRPVKEYKQSCVVNLAPGERQSVTVTLPWRAFQFWHPDTRCWSITPGAHAIQVRPDADSTGLQAEVTLVDGHAKR

SEQ ID NO: 575 - DNA, 1362 bp, Unknown
  Bacterial DNA
atgcttcagtttccgaaagattttatttggggagctgcaacttcatcgtatcaaattgaaggaacagcgactggagaagataaaatttactcgatctgggatcacttttcccgcattcctggcaaagtagcgaatggggataatggcgatatcgcaattgatcattacaatcgttatgttgaagacatcgcattaatgaaagcgcttcatttgaaagcgtatcgattttcgactagttgggcgagactttattgtgaaacgccagggaagtttaacgaaaaaggtttagatttttataagcgtcttgtacatgaattgctagagaacggtatcgagccaatgttgaccatttatcattgggatatgccacaagctcttcaagagaaaggtggctgggaaaatcgtgatatcgttcactacttccaagaatacgctgctttcctttacgagaatcttggggatgtcgtgaaaaaatggattacgcataatgagccgtgggttgtcacctatttaggatatgggaatggcgaacatgccccagggattcaaaactttacatcatttttaaaagcagcacatcatgttcttctctcacacggggaagcggtaaaagcgtttcgagcaatcggttcgaaagatggggaaattggtattacgttgaatttgacacctggatatgcggtcgatccgaaagatgaaaaagcagttgatgccgctcgaaaatgggacggctttatgaatcgttggtttttagatcctgtatttaagggacaatatccagcagatatgttagaagtgtataaagattatttaccagacgtttacaaagagggagatttacaaacgattcagcaaccgatcgactttttcggatttaactattattcaacagcaacattaaaagattggaaaacaggtgaccgtgaaccgatcgtatttgaacatgtgagcacaggaagacctgtgacggatatgaattgggaagtgaatccaaacggtttgtttgatttaatggtgcgattgaaaaaagattatggcgatattccattatacattaccgaaaacggtgctgcatacaaagatcgcgtcaacgaacaaggtgaagtagaagatgatgagcgagttgcttatatacgggagcatttaatcgcttgccaccgcgcgattgaacaaggcgtcaatttaaaaggatattatgtatggtcgctgttcgataattttgagtgggcatttggatatgataagcgctttgggattgtatacgtggattatgaaacgctagagcgcatcccgaaaaagagtgcattatggtacaaggaaacgattataaacaacggattgcaagtagacaatgacaaataa

SEQ ID NO: 576 - protein, 453 aa, Unknown
  Bacterial protein
  DOMAIN (2)...(447): Glycosyl hydrolase family 1
  SITE (8)...(22): Glycosyl hydrolases family 1 N-terminal signature. Prosite id = PS00653
  SITE (186)...(189): N-glycosylation site. Prosite id = PS00001
  SITE (355)...(363): Glycosyl hydrolases family 1 active site. Prosite id = PS00572
MLQFPKDFIWGAATSSYQIEGTATGEDKIYSIWDHFSRIPGKVANGDNGDIAIDHYNRYVEDIALMKALHLKAYRFSTSWARLYCETPGKFNEKGLDFYKRLVHELLENGIEPMLTIYHWDMPQALQEKGGWENRDIVHYFQEYAAFLYENLGDVVKKWITHNEPWVVTYLGYGNGEHAPGIQNFTSFLKAAHHVLLSHGEAVKAFRAIGSKDGEIGITLNLTPGYAVDPKDEKAVDAARKWDGFMNRWFLDPVFKGQYPADMLEVYKDYLPDVYKEGDLQTIQQPIDFFGFNYYSTATLKDWKTGDREPIVFEHVSTGRPVTDMNWEVNPNGLFDLMVRLKKDYGDIPLYITENGAAYKDRVNEQGEVEDDERVAYIREHLIACHRAIEQGVNLKGYYVWSLFDNFEWAFGYDKRFGIVYVDYETLERIPKKSALWYKETIINNGLQVDNDK

SEQ ID NO: 577 - DNA, 2229 bp, Unknown
  Obtained from environmental sample
gtggaaagaatcccatttgttgaagatttactggcccaaatgaccctggaagagaaagtggggcaaatggcacagataacccttgatgtgattaccattggggaagataacactgtatctgacgaacccattgcactggacatggacctggtaagatgggcagtggcagaatacggtgtgggttcggtgctcaacaccgccaataacagggcgcgtacccgcgaaaaatggcacaccatcgtcagccagctgcaggatgttgccatcaatgaaacccgcctgggtattcctgttttgtatggtattgatgccattcatggaacaacttacactgccggtgcaaccttttttccacagcaaatcgggcaggccgctacttttaatccttcattggtgcgcaaagcagctgaaattactgcctacgaaacccgtgcctctgccatcccctggactttctctccggtacttgatatggggcgcgatcctcgtttcccaaggatgtgggaaacctttggggaagatgtttatcttgctaccgtgcttggcgtagaaatgatcaaaggatatgaaggggagaataatgacattagtgatcctttcagagtagcatcctgtgcgaagcattacctgggttacagtgtcccggtttcaggaaaagaccggaccccggctctgataccggaaattgaacttcgcgaaagacacctgcccccgtttcaggcagctgtggaagccggtacccacaccattatggtaaactccggccttatcaacggagtgcccgttcatgcctcttatgaactgcttacggaaatgctgaagaaagaacttgggtttacaggattgttgttaaccgactggaccgatattgagaatctgcatacccgcgaccgtattgccgccacatcaaaagaagcagttaagctggccataaatgcaggaattgatatgtccatgattccctacgatctcgacttttgtgattacctgattgaactggtgaatgaaggagaagttcccatgtcgcgtatcgacgatgccgtgagacggattcttaatacaaaatacaagcttggcctttttgaaactcctgttacttatcacagtgattacccgctgtttggaagcgacgaatttattgaagttgcgtaccagacagcacaggaatccataacactgcttaaaaatgaaaacaatgttttgcctttgcgtaaaaacgctcgggtgctggtaaccggacccaattccaactctatgcgatcactcaatggtggctggagctattcatggcagggagagaaagtggatgagtttgctgaagaatattctaccattctagatgccatccgggaaaaagttggtgaaaataacgctgtatttcgcgaaggggttcgatatgataatgaaagccagtactgggtagatgaagcttttgatatacagggagctgtaagagctgcagcgcaggtagattacatcatcattgcattaggagaaaactcttatgctgagaaaccaggcgatttacatgatctttctttgtcacaaaatcagattgagcttgccaaagcccttgccaaaaccggtaagcccatgatactggttttgaaccagggtcgcccgcgtatcatcagggaaatcgaacccctgatgagtggaataatcaatgcttatctgccgggaaactacggcggacctgctgttgcagatgtgatttttggagattataaccccaatgggaaactcccttttacctatccgctttatgtcaattctctggttacctatgatcataaaccctcagaagatcaggcgagaatggagggggtgtatgattatgaatcggattttgccattcaatatgaatttggttttggtttgagttataccacctttgaatattccaacctgaccattagcaatgaaaggttgtctatgaacgggaagctggaagttaccgttgatgtaaaaaataccggtgaactgccaggtcaggaagtggtgcagttatacacttcggcacattatacttcagttacacctgatgtgaaaaggctcagaggtttcagtaagatccacctcgaacccggacaaaagaaatcggtatcctttaccctttctccatctgatatttcttttatcaatgcgcaaaacagaagggtaaatgaacccggtgcctatgatgtgcttatcgaaagtctttcctcaaccttcaggcttgtagaatag

SEQ ID NO: 578 - protein, 742 aa, Unknown
  Obtained from environmental sample
  DOMAIN (88)...(320): Glycosyl hydrolase family 3 N terminal domain
  DOMAIN (391)...(631): Glycosyl hydrolase family 3 C terminal domain
  SITE (65)...(68): N-glycosylation site. Prosite id = PS00001
  SITE (91)...(94): N-glycosylation site. Prosite id = PS00001
  SITE (276)...(293): Glycosyl hydrolases family 3 active site. Prosite id = PS00775
  SITE (475)...(478): N-glycosylation site. Prosite id = PS00001
  SITE (645)...(648): N-glycosylation site. Prosite id = PS00001
MERIPFVEDLLAQMTLEEKVGQMAQITLDVITIGEDNTVSDEPIALDMDLVRWAVAEYGVGSVLNTANNRARTREKWHTIVSQLQDVAINETRLGIPVLYGIDAIHGTTYTAGATFFPQQIGQAATFNPSLVRKAAEITAYETRASAIPWTFSPVLDMGRDPRFPRMWETFGEDVYLATVLGVEMIKGYEGENNDISDPFRVASCAKHYLGYSVPVSGKDRTPALIPEIELRERHLPPFQAAVEAGTHTIMVNSGLINGVPVHASYELLTEMLKKELGFTGLLLTDWTDIENLHTRDRIAATSKEAVKLAINAGIDMSMIPYDLDFCDYLIELVNEGEVPMSRIDDAVRRILNTKYKLGLFETPVTYHSDYPLFGSDEFIEVAYQTAQESITLLKNENNVLPLRKNARVLVTGPNSNSMRSLNGGWSYSWQGEKVDEFAEEYSTILDAIREKVGENNAVFREGVRYDNESQYWVDEAFDIQGAVRAAAQVDYIIIALGENSYAEKPGDLHDLSLSQNQIELAKALAKTGKPMILVLNQGRPRIIREIEPLMSGIINAYLPGNYGGPAVADVIFGDYNPNGKLPFTYPLYVNSLVTYDHKPSEDQARMEGVYDYESDFAIQYEFGFGLSYTTFEYSNLTISNERLSMNGKLEVTVDVKNTGELPGQEVVQLYTSAHYTSVTPDVKRLRGFSKIHLEPGQKKSVSFTLSPSDISFINAQNRRVNEPGAYDVLIESLSSTFRLVE

SEQ ID NO: 579 - DNA, 1434 bp, Unknown; identical to SEQ ID NO: 423
  Obtained from environmental sample

SEQ ID NO: 580 - protein, 477 aa, Unknown; identical to SEQ ID NO: 424
  Obtained from environmental sample
  DOMAIN (17)...(474): Glycosyl hydrolase family 1
  SITE (25)...(39): Glycosyl hydrolases family 1 N-terminal signature. Prosite id = PS00653
  SITE (388)...(391): N-glycosylation site. Prosite id = PS00001

SEQ ID NO: 581 - DNA, 2268 bp, Unknown
  Obtained from environmental sample
atgacagacgaaaaattgcaggcactcctgaaagacatgagtctgaaagaaaagatcttccagctggtgcagatccccggcagattctttctggaaaacacggaagacaccggtactgcggtggaggagaatctcaccgcggaagagctgcacctgacgggctgcacgctcagtgtttacggcgcggaggagctgcgaaaaattcagcaggattgcgtgaagaaccatccgcatcatataccgatcctttttatggcggacattattcacggataccgcacgatttatcctatgccgcttgcccagggcgctatgtttgatgattcgctgacagaggaactctgtgccatggcggcggaggaaatgcggctcggaggtgtacacgttacctttgcgccgatgcttgatcttgtgcgcgatgcgcgctgggggaggatcatggaatctaccggagaggaccccatgctgaactgccgcctgggaaaggcgaccgtgcggggcttccgggcaggagagaataaaatccccggggaaaaaggagtagcttcctgtattaagcattttgcggcatacggcgctgcggaggcaggcagggattacaccaacaccgaggtttcggaacatactctgagagaatattatctcaagagctataaggcagcaatcgatgccggcgcagatatggtgatgacgtccttcaacacgctcaacggcatgcccgccacggggaatcgctggctgatgaagcaggtgctgagagacgagtggggatttgacggcgtgctgatctccgactggggcgccatcggggaaatggtacagcacggcgtatgcagggatctgcgtgaagcggcaaagctggccattgaaaatggcgttgatgttgatatgtgttcgcttgcttacgcacggtatctggaggagcttgtcgtttccggtgaagtggacgaagcgctgatagataaatcatgtctgcgggtgctgcggctgaaaaacaagctgggcttgtttgaagatcccttccgcggagcggatgcagttgcagagaaggccaatgtactcagtgcggagcaccgtgcacttgcccgaaaggctgtgacggaaagtcttgtcctgctgaagaatgacggtgacgaagaaaagctcctgcccctgaaaagaggggaaaggctcgcctttgttggcccgtatgcacagagcagggaactgcacagcatgtgggcgattgcaggcagagaggatgactgcgtatctgtgcgcatggcggcggaggagatcgccgcagagcagggattttgtccggaattcgcttccggtgcggtgatgacccgtcgggaagacctcgcaaccgatagccgggagattgccgttgaacaggtgcgccacggtgcgtatcagccagctcttgccgccaatgcggagtcagaaaaactgcttgccgaagcggttgatgtggcgaagcacgccgacaaggtaatcgtatgtatcggagaacaccgccgtatgagcggggaaggtgcaagccgcgccgatatcagcattcccgcaccacagctggaactgctggaaaaagtgtatgccgcgaatcagaatatcgtaaccgtggtattcggcgggaggccgcttgacctgagaaaggtctgtatgtgcagtaaagcggtcctgtttgcctggatgcccggtacggaaggcggacacggcattatggatgtactgacaggaaagtgttgcccctccggtgcactgagtgtgacgatgccgtactgtgtgggacaggcgccgatctgctataaccactacagcacaggccgtgcaaaaccgtatgacacggactatccgatctttatctccgcttatatcgatgtaccgacgggtccgctgttccccttcgggtacggcctcagctatacggagtttgcggtctcccctgtacagcttacgaaggctgccgccgaaagctccggcggcgtgctgacggaagcgcaggtaaacgtaacaaactgcggtgaacgggagggcacagcaatcgtgcagctttatatccgtgatgaagtgtcttcactgatccgcccggtaagggaactgaaagggtatcagcggattccgcttgcatcgggggaaatgaagcaggtcacgtttgaaattacggaagaaatgctggcatttgtaaatgcagataatgtatttgcggcagagccgggtaactttacggtatatatcgggttggattccgatacagacaatgcagcaacgtttaccctgatataa

SEQ ID NO: 582 - protein, 755 aa, Unknown
  Obtained from environmental sample
  DOMAIN (76)...(298): Glycosyl hydrolase family 3 N terminal domain
  DOMAIN (370)...(638): Glycosyl hydrolase family 3 C terminal domain
  SITE (44)...(47): N-glycosylation site. Prosite id = PS00001
  SITE (674)...(677): N-glycosylation site. Prosite id = PS00001
  SITE (746)...(749): N-glycosylation site. Prosite id = PS00001
MTDEKLQALLKDMSLKEKIFQLVQIPGRFFLENTEDTGTAVEENLTAEELHLTGCTLSVYGAEELRKIQQDCVKNHPHHIPILFMADIIHGYRTIYPMPLAQGAMFDDSLTEELCAMAAEEMRLGGVHVTFAPMLDLVRDARWGRIMESTGEDPMLNCRLGKATVRGFRAGENKIPGEKGVASCIKHFAAYGAAEAGRDYTNTEVSEHTLREYYLKSYKAAIDAGADMVMTSFNTLNGMPATGNRWLMKQVLRDEWGFDGVLISDWGAIGEMVQHGVCRDLREAAKLAIENGVDVDMCSLAYARYLEELVVSGEVDEALIDKSCLRVLRLKNKLGLFEDPFRGADAVAEKANVLSAEHRALARKAVTESLVLLKNDGDEEKLLPLKRGERLAFVGPYAQSRELHSMWAIAGREDDCVSVRMAAEEIAAEQGFCPEFASGAVMTRREDLATDSREIAVEQVRHGAYQPALAANAESEKLLAEAVDVAKHADKVIVCIGEHRRMSGEGASRADISIPAPQLELLEKVYAANQNIVTVVFGGRPLDLRKVCMCSKAVLFAWMPGTEGGHGIMDVLTGKCCPSGALSVTMPYCVGQAPICYNHYSTGRAKPYDTDYPIFISAYIDVPTGPLFPFGYGLSYTEFAVSPVQLTKAAAESSGGVLTEAQVNVTNCGEREGTAIVQLYIRDEVSSLIRPVRELKGYQRIPLASGEMKQVTFEITEEMLAFVNADNVFAAEPGNFTVYIGLDSDTDNAATFTLI

SEQ ID NO: 583 - DNA, 2577 bp, Unknown
  Obtained from environmental sample
atgctttcgaaccgccggttgatccgtacgattccgcttggcgccgccgcgtacagcgtgctgctggggctggccggttgcagccagagcacggttgcgaccgcgccagccgtcgagcctaccgcatcgcaggccatggtcgcgcagccgcagaactggccgcgcgtggattggccgcttccgcacgatgcggcgctcgaagcgcgcgtggatgcgctgctggcgacgatgagcgtggaggagaaggtcggccagatcgtgcagggcgacatcgacagcatcacgccggaagaccttcgcaagtatcggctgggttcgatcctggccggcggcaattccgatccgggcaggaagtacaacgccgctccttcggaatggctggcgctggccgatgcgttctgggaagcctcgatggatacctctggcggcggcaaggcgatcccggtgatcttcggcatcgacgcggtgcatggacagagcaacatcgtcggagccacgctgtttccgcacaacatcggtttgggcgcaacgcgcaatcccgatctcatccgggaaattggccgcatcaccgcggtggaaacccgcgttacaggcatggaatggacgttcgcgccaacggtcgcggttccgcaggacgaccgctgggggcgcagctacgagggctattcggaaagcgccgatgtcgtcgccagctttgcgccggcgatggtcgaaggactgcagggcatggccggtgcggcggatttcctcgacgaccatcatgtgatgacgtcgatcaagcatttcctcggggatggcggcacgcgcgacggcaaggatcagggcgacaccctcgcgagcgaagcgcagctgcgcgacatccacgccgccggctacatcaccggcatcgcagcgggcgcgcaggcagtaatggcctcgtacaacagctggcatggcgaaaagatgcacgggcgccgcgacctgctcaccgatgtgctgaaggggcgcatggatttcggcggcttcgtggtcggcgattggaatggccacggtcaggtggcgggctgtaccaataccgattgtccggcttcattcaacgccggcctggacatggcgatggcgcccgacagctggaagggcctgtacgagagcacgctggcgcacgtgaaggcaggcacgatcccgatgcagcggctggacgatgcggtgcgccgtatcctgcgggtcaagttccgcatggggctgttcgagaagccgcggccttcgcagcgtgcgctcggcggcaagttcgaactgctcggagcgccggagcatcgcgcggtggcacgtcaggcggtgcgtgaatccctggtgttgctgaagaaccagaacggcctgttgccgctttccccgaatcagagactgctggtggccggcgacggcgcgaacgatctgggcaagcaatccggcggttggacgctcaactggcagggcaccggcaccacgcgtgccgattacccgaacgcggattcgatctgggaagggctcaaggcgcaggtcgaagcggcgggcggtcaggccgagcttgccgtcgatggccagtaccggaaccgaccggacgcggccatcgtcgtgttcggcgagaacccgtacgcggagttccagggagacatcccgaacctgctgtaccgccccggagacgatggcgacctggaactgatccgtcgcctgaaggctgaaggcatcccggtggttgcggtgttcctgagcggcaggccgctgtggatgaatcgcgagatcaacgcggccgatgccttcgtcgcggcctggttgccgggctctgaaggtggcggcgtcgccgatgtgctgctgcgtggcgcggacggcaaggtccagcacgatttcaagggcaagctgagtttctcgtggccgcgtcgcgccgaccagttcgacaacaatgtcggtcaggaaaactacgatccgctgttcgcgttcgggtatggcctgacttatgccgacgacggcgatgtggcgccgttgtccgaggattcgggcatctccggacaggtgtcgcaggcgaatgtgttcttctcgcatggcgttgcgagccaaggcttgaggctgcgcctgatcggcgctgatggcggcatcgcggacgtgatgcatccgcaggcgaagaccgccgacggcacgctggttcttagcgcgatcgactaccagcgccaggaaggtgcacgtcgtttggtgtggacgggcagggcgaccgcggaactgctttccaccacgccgctcgacctgggccgggaaaccaacggcgacgtgaagatcgttgccacgctgcgcatcgacgcgcttccggccgatggcgacgtggcgctgatcgcgcgcagtggtgatcgcagtgccgaacttccgatcggcgactggttcgccagtcttccgcgcgggcagtggttgagcgcgggcgtgctgctcaagtgcctgcgtgtcgctggttcggatacggcgaagctggacgcgccgttctccatccgtggcagcgcagggctggaactggcgctggcgcaagtggtggcggccaccgccgacgacacgcatctggactgcccgatccagtag

SEQ ID NO: 584 - protein, 858 aa, Unknown
  Obtained from environmental sample
  DOMAIN (143)...(367): Glycosyl hydrolase family 3 N terminal domain
  DOMAIN (443)...(659): Glycosyl hydrolase family 3 C terminal domain
MLSNRRLIRTIPLGAAAYSVLLGLAGCSQSTVATAPAVEPTASQAMVAQPQNWPRVDWPLPHDAALEARVDALLATMSVEEKVGQIVQGDIDSITPEDLRKYRLGSILAGGNSDPGRKYNAAPSEWLALADAFWEASMDTSGGGKAIPVIFGIDAVHGQSNIVGATLFPHNIGLGATRNPDLIREIGRITAVETRVTGMEWTFAPTVAVPQDDRWGRSYEGYSESADVVASFAPAMVEGLQGMAGAADFLDDHHVMTSIKHFLGDGGTRDGKDQGDTLASEAQLRDIHAAGYITGIAAGAQAVMASYNSWHGEKMHGRRDLLTDVLKGRMDFGGFVVGDWNGHGQVAGCTNTDCPASFNAGLDMAMAPDSWKGLYESTLAHVKAGTIPMQRLDDAVRRILRVKFRMGLFEKPRPSQRALGGKFELLGAPEHRAVARQAVRESLVLLKNQNGLLPLSPNQRLLVAGDGANDLGKQSGGWTLNWQGTGTTRADYPNADSIWEGLKAQVEAAGGQAELAVDGQYRNRPDAAIVVFGENPYAEFQGDIPNLLYRPGDDGDLELIRRLKAEGIPVVAVFLSGRPLWMNREINAADAFVAAWLPGSEGGGVADVLLRGADGKVQHDFKGKLSFSWPRRADQFDNNVGQENYDPLFAFGYGLTYADDGDVAPLSEDSGISGQVSQANVFFSHGVASQGLRLRLIGADGGIADVMHPQAKTADGTLVLSAIDYQRQEGARRLVWTGRATAELLSTTPLDLGRETNGDVKIVATLRIDALPADGDVALIARSGDRSAELPIGDWFASLPRGQWLSAGVLLKCLRVAGSDTAKLDAPFSIRGSAGLELALAQVVAATADDTHLDCPIQ

SEQ ID NO: 585 - DNA, 2331 bp, Unknown
  Obtained from environmental sample
atgaaaattcgctcgcttctgctgctcatttcgatcctcctcggtgtagtttcgcctgggtttggccagtcggtgctcgacagcgatacgatctttcgcgaggtttcacgacggccgatgaggcctaataacgaggcccggatcgaagcgctcatacgacagatgacggtcgaagaaaaggtcggccagatgacgcagctcacgatcgatatggtcacgagcggcgatgatcaggcggtacagatcgacaacgcaaagcttgaaaaggcggtcgttcaatacggcgttggttcgatcctcaacgtcaacaatcaggctttaacactcgatcattggcatcggatcattgggccgatccagcaagcggctcagcggactcggctgaagatcccggtcatttacggtgtcgattcgatccacggagcaaactacgttcagggctcaacgctgtttccgcaagagctcggaatggcgtcgacttggaatccaaatttgatgcgatgggcggcggagatcacggcgaaggaaacgcgggcggccggcatcccctggagcttttcacccgttctcgacgttggccgaaatcaagcatggccgcgattgtgggaaacgttcggcgaagatccgtatctggcgacagtgatgggaaccgcattcgtacgcggtctcgaaggcgatgatgttgcgagcggcaagcacgtcgccgcgagcctaaagcactacgtcggatacagcatctcgacgaccggccgcgatcgcacgcccgctgtcattccagagcattaccttcgcgaatatttgctgccgccgtttgctgcggcagtaaaggctggagccaggacggtgatgatcaactccgccgagatcaacggagttccgggtcacatcaacaagcacctgatgaccgatgtcctcaagggcgaacttggctttgacggtttcattgtttcggattgggacgacattaaaaagctcgtttcgcaatggcgcgtcgcggccgatgaaaaagaagccacgcggctcgcggtgatggccggcatcgatatgagtatggtgccgctgagctacagtttctcagatcatctgatcgccctagtgaaagaaggtaaggttccgatgtcgcggatcgacgacgcggttcgccgcattcttcgcgtgaaattcgaacttggattgttcaagaatgcgatgccggatccgtcgcttcgttcaaatcacggcagccccgaatacaccgccgtggctgccgcagcggctcgcggatcgatcattctcctcaagaatcaaaacaacattcttccactgtcgaaaacggccaaggtccttgtcaccggcccgacagctgactcaatgatctcgctaaataacggctggacatacgtctggcagggctcggagccgtcgctctacccgaaggataagccgacgatccagaaggcgatcgaagcaaagaccggtccggcaaacttcaagtatgtaccgggaacgcgactcgttcgccgagccggcagtccgtcgaacagcaacccgactgacattgatgaggaagtggatatcgccgccgctgtccaggccgcgaagtcgagtgatgtcgtcgttctctgcctgggtgaaggttcgtacaccgagcatcccggaagcatcgcggatctcaccttgcccgagcttcaacttcagttcgccgagcgaatgatcgccacggggaagccgatagtacttgtattgtcgcaaggccgtcctcgtgtgatcagccgcattgcggacagggtcgccgggatagtcctcgcgttcaatcccggcaacgaaggtggccgtgcgttcgctgacgttttattcggcgactataatccggatggaaagttgccggtaacatatcctcgctcgcccggatatctcacgacctacgacgaaaacatcttcgaacgtgtaatggacgcacgaaaagcgctgacatttcaaccgcagttcgagtttggatacggtttgagctatacgacctttagctactcgaatataaaactcgcctccgaccgaatgcagcgaaatggaactctgtcattctccgtcgatgtagccaacaccggaaaacggcggggaactgagacggtcatcgtctacgtccgcgacgaagtcgccgggctaacgccggccgcaaagcgtgtcagaagattcgcaaaaggaaatttggagccgggagaatcgaagacgttcaatttcacactacgtcccgatgatctcggatacttcggactcgacaacaaactgcagatcgagccgggcgagttcacgatcatgatcggcgatcgaaccgccaagttcacgttggaataa

SEQ ID NO: 586 - protein, 776 aa, Unknown
  Obtained from environmental sample
  SIGNAL (1)...(22)
  DOMAIN (122)...(352): Glycosyl hydrolase family 3 N terminal domain
  DOMAIN (423)...(666): Glycosyl hydrolase family 3 C terminal domain
  SITE (308)...(325): Glycosyl hydrolases family 3 active site. Prosite id = PS00775
  SITE (692)...(695): N-glycosylation site. Prosite id = PS00001
  SITE (749)...(752): N-glycosylation site. Prosite id = PS00001
MKIRSLLLLISILLGVVSPGFGQSVLDSDTIFREVSRRPMRPNNEARIEALIRQMTVEEKVGQMTQLTIDMVTSGDDQAVQIDNAKLEKAVVQYGVGSILNVNNQALTLDHWHRIIGPIQQAAQRTRLKIPVIYGVDSIHGANYVQGSTLFPQELGMASTWNPNLMRWAAEITAKETRAAGIPWSFSPVLDVGRNQAWPRLWETFGEDPYLATVMGTAFVRGLEGDDVASGKHVAASLKHYVGYSISTTGRDRTPAVIPEHYLREYLLPPFAAAVKAGARTVMINSAEINGVPGHINKHLMTDVLKGELGFDGFIVSDWDDIKKLVSQWRVAADEKEATRLAVMAGIDMSMVPLSYSFSDHLIALVKEGKVPMSRIDDAVRRILRVKFELGLFKNAMPDPSLRSNHGSPEYTAVAAAAARGSIILLKNQNNILPLSKTAKVLVTGPTADSMISLNNGWTYVWQGSEPSLYPKDKPTIQKAIEAKTGPANFKYVPGTRLVRRAGSPSNSNPTDIDEEVDIAAAVQAAKSSDVVVLCLGEGSYTEHPGSIADLTLPELQLQFAERMIATGKPIVLVLSQGRPRVISRIADRVAGIVLAFNPGNEGGRAFADVLFGDYNPDGKLPVTYPRSPGYLTTYDENIFERVMDARKALTFQPQFEFGYGLSYTTFSYSNIKLASDRMQRNGTLSFSVDVANTGKRRGTETVIVYVRDEVAGLTPAAKRVRRFAKGNLEPGESKTFNFTLRPDDLGYFGLDNKLQIEPGEFTIMIGDRTAKFTLE

SEQ ID NO: 587 - DNA, 2238 bp, Unknown
  Obtained from environmental sample
ttgaacaccggctggcgcggaagcttcctcgcagtcgccgcggtttcgctggcggcgctcgcgacttcatctgtggcgcaggcgccgagcgccggcgagcgcgccgaggccgcggtcagcaagatgactgtcgaggagaagctgaagctcgtcttcggctatttcgccagcgactgggagggcaagaagccgcccgctgaagcgcactacgggtcggccggctacgtgccgggaattccgcggctcggcatcccaccgcaatatgagaccgatgccggcgttggagtcgcgacccagggtgccgccaagacgaagcgcgagcgcacgtcgctgccgtcgggaatcgcgaccgcggcgacgtggaacccggagatcgccttccagggcgggcgaatgatcggatctgaggcgcgcgcgtcgggcttcaacgtcatgctcgcggggggcgtcaacctgctgcgcgacccgcgcaacgggcgcaacttcgaatatggcggcgaggacccgctgctcgccggcacgatcgtcggctccgagatcgcgggcatccagtccaaccagatcatctcgaccacgaagcattacgcgctcaacgacctcgagaccggccgcaagggccacgacgtgcgcatcgatccagctgccgcacgcatgtcggacctgctggcattccagctcgcgatcgaacgcggcgatcccggctcggtgatgtgctcgtacaacaaggtgggcggcgacttcgcctgcgagaacgactggcttttgaaccaggtgctgaagggcgactggggcttccgtggctatgtgatgagcgactggggcgcggtgcacagcacggtcaaggcggccgtcaacggcctcgaccagcaatcgggctggccgttcgacgacaagccctatctcggctcgctgctgaagcaggcggtcgcgtcggggcaggtgcccaaatcacggctcgacgacatggctcggcgcgtgctgtacgcgatgttcgcgcacggcgtcgtcgacaatcccgtcaccgaaggcggagcgatcgactatgcggccgacgaggcagtgagccgcgccgacgcagaacaggcgatcgtgctgctcaagaacgaaggcaacctgctcccgctcgatgcgcggcggatcgtcgtcatcggcggccatgccgacaagggcgtgctcgcgggcagcggctcgtcactggtctatccgcgcggcggcaatgcggtcccgggcctaccgccgaccggctggcccggaccggtgatgtatttcccgtcatcgccggtgcaggcgctgcagcggctggtgccgaacgcgagcgtgagcttcgtcgacggcaccgatccgactgcggctgccgccgcggctcaggcggcggacgtcgcgatcgtcttcggcacccaatggtcgagcgagtcgatcgacgtgccgatgaagctcgacggcaaccaggacgcgctgatcgccgccgtcgccgcggcgaacccgcggaccgtcgtcgtgctcgaaaccaatgccggggtgacgatgccctgggccgcgcgcgtgccagccatcgtcgaggcctggtatccgggatcggcggggggcgaggcgatcgccaacgtcctcaccggacgcgtgaacccgtcgggccgcctgccggtgaccttttatgcgtccgaagcgcagcttccgcgcccggcgcgtcccggcaaggatagcgagatggaccagttcgacctgccttacgcggagggtgcagcggtcggctacaaatgggtcgatcgcaacaatctgcagccgctgttcccgttcgggcacggccttgcctacacgacttacgactatgggccgatcagcgtcgctccggagccgaacggcggccttcgggtgcagttcacgctgcggaacacgggcaatcgcccgggcatggccgtcgggcaggtttacgcctcgccggcgagcggcggctgggaggcgcccaggcggctcgtcggcttcgccaaggtcgagctcgcgcccggcgccgcgcagacggtcgccgtcgatgtcgatccgcgcctgctcgccacgttcgacgagccggggcacagctggaacatcgcgcccggcacctacaatctgatgcttggagcctcgtcgcgcgacctgcgcagcaacacgagcgtcacgcttccggcgctcagccttccggcgaactggcggccgggacaggaaggcgctgccccagcgccgcggcccggcgagcgaggccgataa

SEQ ID NO: 588 - protein, 745 aa, Unknown
  Obtained from environmental sample
  SIGNAL (1)...(26)
  DOMAIN (76)...(292): Glycosyl hydrolase family 3 N terminal domain
  DOMAIN (363)...(606): Glycosyl hydrolase family 3 C terminal domain
  SITE (443)...(446): N-glycosylation site. Prosite id = PS00001
  SITE (723)...(726): N-glycosylation site. Prosite id = PS00001
MNTGWRGSFLAVAAVSLAALATSSVAQAPSAGERAEAAVSKMTVEEKLKLVFGYFASDWEGKKPPAEAHYGSAGYVPGIPRLGIPPQYETDAGVGVATQGAAKTKRERTSLPSGIATAATWNPEIAFQGGRMIGSEARASGFNVMLAGGVNLLRDPRNGRNFEYGGEDPLLAGTIVGSEIAGIQSNQIISTTKHYALNDLETGRKGHDVRIDPAAARMSDLLAFQLAIERGDPGSVMCSYNKVGGDFACENDWLLNQVLKGDWGFRGYVMSDWGAVHSTVKAAVNGLDQQSGWPFDDKPYLGSLLKQAVASGQVPKSRLDDMARRVLYAMFAHGVVDNPVTEGGAIDYAADEAVSRADAEQAIVLLKNEGNLLPLDARRIVVIGGHADKGVLAGSGSSLVYPRGGNAVPGLPPTGWPGPVMYFPSSPVQALQRLVPNASVSFVDGTDPTAAAAAAQAADVAIVFGTQWSSESIDVPMKLDGNQDALIAAVAAANPRTVVVLETNAGVTMPWAARVPAIVEAWYPGSAGGEAIANVLTGRVNPSGRLPVTFYASEAQLPRPARPGKDSEMDQFDLPYAEGAAVGYKWVDRNNLQPLFPFGHGLAYTTYDYGPISVAPEPNGGLRVQFTLRNTGNRPGMAVGQVYASPASGGWEAPRRLVGFAKVELAPGAAQTVAVDVDPRLLATFDEPGHSWNIAPGTYNLMLGASSRDLRSNTSVTLPALSLPANWRPGQEGAAPAPRPGERGR

SEQ ID NO: 589 - DNA, 1314 bp, Unknown
  Obtained from environmental sample
atgaccgatcgtgatgtttcgcgccgtgcgctgctgtccctggcggcggtcgccgccgcgaccccggccgtagccgctggccaggccaagccagccggcaacatgcccaaggacttcctgtggggcgcggccaccgccggtcaccaggtcgagggcaacaacgtcaacagcgacatctggctgctggagcagttgaagcccggcccgttcatggagccgtccggcgacgcctgcgaccactatcatcgctatgccgacgacatcgccatgttggcgaagctgggcttcaacacctatcgcttctcgctggaatgggcgcggatcgagccggccaagggccagttctcggccgccgagctgaaccactaccgccaggtcgccgccacttgccgcaagcatggcgtgacgccggtggtcaccttcaaccacttcaccgtgccgcgctggttcgcggcccagggcggctgggagaacccggagtcgccggcgctgttcgcgcgctattgcgactacgcggtcaagggcatcggcgacctgatcggcgtggcggcgaccttcaacgagccgaacatcggcatgctgctggtgtggatgctgccgccgttcatcctggaccagatgaagcaggccatggccgacgcggccaaggcctgcggcagcgccaccttctccagcgcccagttcggtcgccaggacgtcatgatgcccaatctgatcgaggctcaccgcctgggttatgcggcgatcaaggccggccccggcgacttccccgtcggcgccaccgtggcgatgatggacgaccaggcggtcggcccaggcagccgccgcgacgagaagcgggcccagtgctacacgccgtggctcgacatgctgaaggccaccggcgacttcgtgggcgtgcagacctacagccgcgcccgcgtcgacgccaagggccagatgcacccgcccgagggcgccgaactgacccagaccggcgaggagttctggccccaggcgctggagcagaccatccgctacgcccacgccgccacgggcaagccgatctatgtcaccgagaacggcgtctcgaccgagaacgacgcccgccgcgtcgcctacatccagaccgctctgcagggcgtgaaggcctgcctggccgacggcgtgccggtgcgcggctacatccactggtcgctgatggacaatttcgagtgggtgttcggctacgggcccaagttcggcctggtcgccgtcgaccgcgccacccaggtccgcacgcccaagcccagcgccgtgctgctgggctccatcgcccgcgccaaccggatctga

SEQ ID NO: 590 - protein, 437 aa, Unknown
  Obtained from environmental sample
  SIGNAL (1)...(25)
  DOMAIN (31)...(437): Glycosyl hydrolase family 1
  SITE (354)...(362): Glycosyl hydrolases family 1 active site. Prosite id = PS00572
MTDRDVSRRALLSLAAVAAATPAVAAGQAKPAGNMPKDFLWGAATAGHQVEGNNVNSDIWLLEQLKPGPFMEPSGDACDHYHRYADDIAMLAKLGFNTYRFSLEWARIEPAKGQFSAAELNHYRQVAATCRKHGVTPVVTFNHFTVPRWFAAQGGWENPESPALFARYCDYAVKGIGDLIGVAATFNEPNIGMLLVWMLPPFILDQMKQAMADAAKACGSATFSSAQFGRQDVMMPNLIEAHRLGYAAIKAGPGDFPVGATVAMMDDQAVGPGSRRDEKRAQCYTPWLDMLKATGDFVGVQTYSRARVDAKGQMHPPEGAELTQTGEEFWPQALEQTIRYAHAATGKPIYVTENGVSTENDARRVAYIQTALQGVKACLADGVPVRGYIHWSLMDNFEWVFGYGPKFGLVAVDRATQVRTPKPSAVLLGSIARANRI

SEQ ID NO: 591 - DNA, 1455 bp, Unknown
  Obtained from environmental sample
atgaatcgccgcgaactgctcgcctccaccctggccttcagtgccgcctcggccctgcctgccgccgcccgtgaaaaggcgttcgtgccgggcaccttcccgccgggcttcctgtggggcgccgccaccgccgcctaccaggtcgagggcgcctataacgaggatggcaaaggcgaatccgtctgggaccgcttcgtgctggcgccgggcaagatcaaggaaggccacaccggcaacgtcgcctgcgacagctaccacaaatatgccgaggatatcgccctgctgaaggcgatgaacctgaagacctaccgcttctcgaccgcctggacgcgcatccagcccgatggcaccggcccggccaatccgaaggggctcgactactattcgcgcctgaccgacgccttgctggaggccggcattcgtccgatgccgacgctctatcactgggatctgccgcagaacctcgaagacctcggtggctggcccaaccgcgacacggcctggcgctatgccgactatgccgatatcatggtgcgagcgctgggtgaccgtatcgagaactggtcgctgttcaacgaatccaagaccttcaccggcctgggctacaatgtcggcatcttcgcgccgggacggaaagacccttacgcctttatccgctcgacccacacggtcaacctggcgcacggcctgggctacaaagcgatcaaggcggccaatccgaagctgaaggtcggcagcgtctatgacgtcacgccgatgatcccggcctcgcaatccgaggccgatgtccgcgccgccgatatctgggacaagtggcagaacctgtggttcgtcaacaccaccctgaccgggcagtatccggaaggcgtcttcccggtggacaaacaggaagccctgctcggctaccaggccggcgacgatgcgatcatgaaggccgatctcgatttcgtcgggctcaactactattccggcacgctgtgttcgtatggcaaggaggccagcggcgtgccctttatcgacgtcaacgcccagtggccctacgccacgccggacaaggatatgggccggaccgacttcaactgggcggtctatccgcaggggttctacgatatcctgacgcgcatgcacaaggtcaccggcgaccggccgatcgagatcaccgaaaacggctgtgcctataatgtcggtcccgacgctaccggccagatccacgatccgaagcgcatcgatttctacaagggccacttcgaggcgatgtcgcgcgccatccatgacggcgtgccggtgcgcggctatcacgcatggagcctgatggacaatttcgagtgggcttcgggttacaccatgcgtttcggcctgacctatgtcgatttcgacaacggccagacgcgcacgatcaaggattccggcaagtggtacgcccaggtcgccaaggccaattcgagcaatctgtaa

SEQ ID NO: 592 - protein, 484 aa, Unknown
  Obtained from environmental sample
  SIGNAL (1)...(23)
  DOMAIN (29)...(482): Glycosyl hydrolase family 1
  SITE (37)...(51): Glycosyl hydrolases family 1 N-terminal signature. Prosite id = PS00653
  SITE (189)...(192): N-glycosylation site. Prosite id = PS00001
  SITE (194)...(197): N-glycosylation site. Prosite id = PS00001
  SITE (283)...(286): N-glycosylation site. Prosite id = PS00001
  SITE (487)...(490): N-glycosylation site. Prosite id = PS00001
MNRRELLASTLAFSAASALPAAAREKAFVPGTFPPGFLWGAATAAYQVEGAYNEDGKGESVWDRFVLAPGKIKEGHTGNVACDSYHKYAEDIALLKAMNLKTYRFSTAWTRIQPDGTGPANPKGLDYYSRLTDALLEAGIRPMPTLYHWDLPQNLEDLGGWPNRDTAWRYADYADIMVRALGDRIENWSLFNESKTFTGLGYNVGIFAPGRKDPYAFIRSTHTVNLAHGLGYKAIKAANPKLKVGSVYDVTPMIPASQSEADVRAADIWDKWQNLWFVNTTLTGQYPEGVFPVDKQEALLGYQAGDDAIMKADLDFVGLNYYSGTLCSYGKEASGVPFIDVNAQWPYATPDKDMGRTDFNWAVYPQGFYDILTRMHKVTGDRPIEITENGCAYNVGPDATGQIHDPKRIDFYKGHFEAMSRAIHDGVPVRGYHAWSLMDNFEWASGYTMRFGLTYVDFDNGQTRTIKDSGKWYAQVAKANSSNL

SEQ ID NO: 593 - DNA, 2007 bp, Unknown
  Obtained from environmental sample
atgaattgcactttgaaaccgatggcccgcgtggtcgccggctgcgtcgccacgcttgccctggccgcttgcggcagcgataccggcagcgagggctacacgcagcccgtgttcggcgccactacctacacccagctcaaggtcgacggttataccttcaaggatatgaaccgcaacggcaagatcgacccgtacgaagactggcgcctgtcggccgaggagcgcgccgacgacctgctgtcgcgcctgagcctcgatgaaaaagcgggcctgatgatgcacggcacggcgcccaccgtgtccgacccttccggcatcggcctgggcggcgcgtatgacctggcggccttgcaagacctgatcgtgaagcagtatgtcaacacgtttattacgcgcatggcgggcgatacggccaatatggcggcccagtacaacaaggtgcaggccctgagcgaaacctcgcgccatggcattcccgtctccatcagcacggacccgcgccaccatttccagtatacggtgggcgccagcgcggctacctccggcttctcgcagtggccggaaacactgggcctggccgccattggcgatgatgccctggtgcgccgcttcggcgacatcgcgcgccaggaatacctggccgtcggcatcacgcaagccctgtcgccgcaggcggacctggctaccgagccgcgctggtcgcgcatcaacggcacttttggcgaagacgccgacctggccaagcgcatggtgcagcactatatcgagggcttccaggacggcaatacgggcttgcatgacggcagcgtggtggctgtcgtcaagcactgggtcggctacggcgccacgaaagagggctttgacggccacaattactatggccgctacatgacctacccgggcaacaacttcgcttaccacgtgaagccgttcgaaggggcgttcacggccaaggcggcttccgtcatgccgacgtacgccctgccagacggcaatatcaccatagccggcatcaccctggaacaagtggcggccggtttcagcaagaccatgttgaccgatctgctgcgcggcaaatatggttttgagggggtgatcctgtccgactggggcatcacgtcagactgcgacgccaactgccgcaacggcacggcgccgggcgtcgcgccttcgttcatcggcttcggcacgccgtggggcatggaagacgccaccaaggccgaacgttacgtgaaggctgtcacggcggggatggaccagtttggcggcgtgacggaagcgccgtacctgacgcaagccgtgcagcggggccagctgacggaagcgcgcatcaacgcctcggcgcggcgtatcctgatccaaaaattcaagcagggccttttcgagcatccatttgtcgatgcggccaaggcagccgccacggtgggcaaggcggaattcgtcgaggcgggcctggacgcccagcgccgttcgctggtcctgctggaaaacaaggacaaggtcttgccgctggcggccagcgtcaagaaggtttacctgtacggcatcgacgcggccgtggccaagcagtatggctacacggtggtggccacgccgcaggaagcggacgtggccctgctgcgggtggcggcgccctatgaaaccctgcacccgaattacatcttcggcagcatgcagcacgaaggccgcctgaactatgccgatggcgacgccgactacgaggcgatcaagaacgcggcgaaattcgcgccgaagacggtggtgacggtgtacctggaccgaccggccattctcggcaacgtgcaggacaaggccagtgccattgtcgccaactttggcgtgagcgacggcgcgctgttcgatgtcctgacgggcaaggccaagccgcaaggcaagctgccgttcgagctgccctcgtcgatggccgaagtgcagatgcagaaatcggacgtgccgtatgacacggcccatccgctgtacaagtttggcgccgggctggcgtactga

SEQ ID NO: 594 - protein, 668 aa, Unknown
  Obtained from environmental sample
  DOMAIN (150)...(381): Glycosyl hydrolase family 3 N terminal domain
  DOMAIN (492)...(668): Glycosyl hydrolase family 3 C terminal domain
  SITE (2)...(5): N-glycosylation site. Prosite id = PS00001
  SITE (240)...(243): N-glycosylation site. Prosite id = PS00001
  SITE (337)...(340): N-glycosylation site. Prosite id = PS00001
  SITE (360)...(377): Glycosyl hydrolases family 3 active site. Prosite id = PS00775
  SITE (387)...(390): N-glycosylation site. Prosite id = PS00001
  SITE (451)...(454): N-glycosylation site. Prosite id = PS00001
MNCTLKPMARVVAGCVATLALAACGSDTGSEGYTQPVFGATTYTQLKVDGYTFKDMNRNGKIDPYEDWRLSAEERADDLLSRLSLDEKAGLMMHGTAPTVSDPSGIGLGGAYDLAALQDLIVKQYVNTFITRMAGDTANMAAQYNKVQALSETSRHGIPVSISTDPRHHFQYTVGASAATSGFSQWPETLGLAAIGDDALVRRFGDIARQEYLAVGITQALSPQADLATEPRWSRINGTFGEDADLAKRMVQHYIEGFQDGNTGLHDGSVVAVVKHWVGYGATKEGFDGHNYYGRYMTYPGNNFAYHVKPFEGAFTAKAASVMPTYALPDGNITIAGITLEQVAAGFSKTMLTDLLRGKYGFEGVILSDWGITSDCDANCRNGTAPGVAPSFIGFGTPWGMEDATKAERYVKAVTAGMDQFGGVTEAPYLTQAVQRGQLTEARINASARRILIQKFKQGLFEHPFVDAAKAAATVGKAEFVEAGLDAQRRSLVLLENKDKVLPLAASVKKVYLYGIDAAVAKQYGYTVVATPQEADVALLRVAAPYETLHPNYIFGSMQHEGRLNYADGDADYEAIKNAAKFAPKTVVTVYLDRPAILGNVQDKASAIVANFGVSDGALFDVLTGKAKPQGKLPFELPSSMAEVQMQKSDVPYDTAHPLYKFGAGLAY

SEQ ID NO: 595 - DNA, 2244 bp, Unknown
  Obtained from environmental sample
atgtcgttattcagaccacaccctctgaaaaccgctctggcaactgttctgctcggagccctcaccggacaagcattggccgcccccgcaccgggcgttgatgctttgacgttgaaacagaaaattggccagttgcagcaaatgcacagtgaggccaaaaccgttggagaaatccccgaggaactcaaagccgccatccgcaatggccaagtgggttctatcctgaacatcggcagccccgaggtcgccaacgaactgcagcgcatcgccatgacggaaagcgccgccaagatcccgctgattttcgcccgggatgtaatccacggttatcgcaccatcatgcctactcccttggggcaggcggcgagctggaatgcggacttggtggagaaaggcgctcgcgctgcggcggtggaagcgtccagcgtgggtatccgctggaccttcgcgccgatgatcgacatctcccgcgactcccgctggggccgcattaccgaatcttttggcgaagacccttacctcacctccgttctgaccgtcgcatccgtgcgcggttatcagggcgattctctgagcgatcccactagtattgccgccaccgccaaacattttgtcggctacggcgcggccgagggcgggcgggactacaacgtcacttacatccccgagccgctgctgcacaacatctatctgccgccattcaaagccgccgtggatgcaggggttgcgaccatcatgtccgcattcaatgaactcaacggtgtgcctgcgtctgcccacgattacgcaatcaatacggtattgcgtggcgaatttggtttcgacggcgtgatcgtcagcgactgggattcggtgctggaactgattgctcacggttacgcagcggataaacaacaagccgcattgcaggctttgaaggctggcctcgacattgaaatggtctccaccaccatgcaagagaacttgccagcgctgctcgacagcggcaaggtgagcgaggaggaagtggatgtaaaagtgacccggatcattgacttaaaacgcaatcttggtttgttcgagaagccctatatccaaggtgatccttcgaagtcaatactcactccagagcacaagagcttgagcgaacagctggccctcgaaagtcttgtgctgctgaaaaatgacaagcagaccctgccgttggcgaagggaaagcgcgtcgctttgattggcccgctcgcccacgccgcgcatgaccagttgggttcatgggtgctggatgcgcagaagcaggattcggtgaccgtgctggatgccttccgcaatgtgcttagccaggacaagttgttctactctcaggcgctttacagcagccggtcccgcgacagcaaagatttcgcccaagccatcgagcaggcgaataaggctgacgtgattgtttatgtgggcggtgaagaagcggtgttgagcggcgaggcgcacagtcgtgcggatacccgtctgccgggtgcacaggaacaattgatccgcgaactgaagaagaccggcaagccattggtggtggtgattatggcgggccggccgattgcgatgaatgacgttatcgacgaaattgatgcgctggtgatggcatggcatccgggcaccatgggcggcccggcgattgtccgtttgctgcaaggggatgcggagcccgtgggccgtctgccggtcacttggccgaaagtcaccggccagatgccgatctattacaaccatccgagttctggtcgcccggcgtccgaaggcaacttcacccagatggatgattttccgctggaggctttccaacactctaccggtcacaaaaatcactacattgatataggttttaaaccgcaatttccgtttggatttggtctgagttattccacggtgacatacagcgatatcaaggtggataaaaaagccatcgcgatcaacggcgaattaaaggtgtccgccaaaatcaccaatagcggcaaacgcccggtgacggaaacggcgcagctttatattcgcgatttagtcgccagcagcgtacgaccggtacgggagttgaagagcttccagcgcgttaccctgaagccgaaagaatccaagcgagttaccttcacgttacgcgagagcgatttggcgttttacaaccagaaattggagcacctggtggagcctggtgaattccatgtttggattgcgcctaatgcggaagagggcgtaaaagcggaatttgctgtgcgttga

SEQ ID NO: 596 - protein, 747 aa, Unknown
  Obtained from environmental sample
  SIGNAL (1)...(27)
  DOMAIN (95)...(314): Glycosyl hydrolase family 3 N terminal domain
  DOMAIN (383)...(632): Glycosyl hydrolase family 3 C terminal domain
  SITE (220)...(223): N-glycosylation site. Prosite id = PS00001
  SITE (271)...(288): Glycosyl hydrolases family 3 active site. Prosite id = PS00775
  SITE (600)...(603): N-glycosylation site. Prosite id = PS00001
MSLFRPHPLKTALATVLLGALTGQALAAPAPGVDALTLKQKIGQLQQMHSEAKTVGEIPEELKAAIRNGQVGSILNIGSPEVANELQRIAMTESAAKIPLIFARDVIHGYRTIMPTPLGQAASWNADLVEKGARAAAVEASSVGIRWTFAPMIDISRDSRWGRITESFGEDPYLTSVLTVASVRGYQGDSLSDPTSIAATAKHFVGYGAAEGGRDYNVTYIPEPLLHNIYLPPFKAAVDAGVATIMSAFNELNGVPASAHDYAINTVLRGEFGFDGVIVSDWDSVLELIAHGYAADKQQAALQALKAGLDIEMVSTTMQENLPALLDSGKVSEEEVDVKVTRIIDLKRNLGLFEKPYIQGDPSKSILTPEHKSLSEQLALESLVLLKNDKQTLPLAKGKRVALIGPLAHAAHDQLGSWVLDAQKQDSVTVLDAFRNVLSQDKLFYSQALYSSRSRDSKDFAQAIEQANKADVIVYVGGEEAVLSGEAHSRADTRLPGAQEQLIRELKKTGKPLVVVIMAGRPIAMNDVIDEIDALVMAWHPGTMGGPAIVRLLQGDAEPVGRLPVTWPKVTGQMPIYYNHPSSGRPASEGNFTQMDDFPLEAFQHSTGHKNHYIDIGFKPQFPFGFGLSYSTVTYSDIKVDKKAIAINGELKVSAKITNSGKRPVTETAQLYIRDLVASSVRPVRELKSFQRVTLKPKESKRVTFTLRESDLAFYNQKLEHLVEPGEFHVWIAPNAEEGVKAEFAVR

SEQ ID NO: 597 - DNA, 1416 bp, Trichoderma reesei ATCC 13631
atgattgtcggcattctcaccacgctggctacgctggccacactcgcagctagtgtgcctctagaggagcggcaagcttgctcaagcgtctggggccaatgtggtggccagaattggtcgggtccgacttgctgtgcttccggaagcacatgcgtctactccaacgactattactcccagtgtcttcccggcgctgcaagctcaagctcgtccacgcgcgccgcgtcgacgacttctcgagtatcccccacaacatcccggtcgagctccgcgacgcctccacctggttctactactaccagagtacctccagtcggatcgggaaccgctacgtattcaggcaacccttttgttggggtcactccttgggccaatgcatattacgcctctgaagttagcagcctcgctattcctagcttgactggagccatggccactgctgcagcagctgtcgcaaaggttccctcttttatgtggctagatactcttgacaagacccctctcatggagcaaaccttggccgacatccgcaccgccaacaagaatggcggtaactatgccggacagtttgtggtgtatgacttgccggatcgcgattgcgctgcccttgcctcgaatggcgaatactctattgccgatggtggcgtcgccaaatataagaactatatcgacaccattcgtcaaattgtcgtggaatattccgatatccggaccctcctggttattgagcctgactctcttgccaacctggtgaccaacctcggtactccaaagtgtgccaatgctcagtcagcctaccttgagtgcatcaactacgccgtcacacagctgaaccttccaaatgttgcgatgtatttggacgctggccatgcaggatggcttggctggccggcaaaccaagacccggccgctcagctatttgcaaatgtttacaagaatgcatcgtctccgagagctcttcgcggattggcaaccaatgtcgccaactacaacgggtggaacattaccagccccccatcgtacacgcaaggcaacgctgtctacaacgagaagctgtacatccacgctattggacctcttcttgccaatcacggctggtccaacgccttcttcatcactgatcaaggtcgatcgggaaagcagcctaccggacagcaacagtggggagactggtgcaatgtgatcggcaccggatttggtattcgcccatccgcaaacactggggactcgttgctggattcgtttgtctgggtcaagccaggcggcgagtgtgacggcaccagcgacagcagtgcgccacgatttgactcccactgtgcgctcccagatgccttgcaaccggcgcctcaagctggtgcttggttccaagcctactttgtgcagcttctcacaaacgcaaacccatcgttcctgtaa

SEQ ID NO: 598 - protein, 471 aa, Trichoderma reesei ATCC 13631
  SIGNAL (1)...(16)
  DOMAIN (30)...(58): Fungal cellulose binding domain
  DOMAIN (124)...(437): Glycosyl hydrolases family 6
  SITE (34)...(61): Cellulose-binding domain, fungal type. Prosite id = PS00562
  SITE (38)...(41): N-glycosylation site. Prosite id = PS00001
  SITE (242)...(251): Glycosyl hydrolases family 6 signature 2. Prosite id = PS00656
  SITE (317)...(320): N-glycosylation site. Prosite id = PS00001
  SITE (339)...(342): N-glycosylation site. Prosite id = PS00001
MIVGILTTLATLATLAASVPLEERQACSSVWGQCGGQNWSGPTCCASGSTCVYSNDYYSQCLPGAASSSSSTRAASTTSRVSPTTSRSSSATPPPGSTTTRVPPVGSGTATYSGNPFVGVTPWANAYYASEVSSLAIPSLTGAMATAAAAVAKVPSFMWLDTLDKTPLMEQTLADIRTANKNGGNYAGQFVVYDLPDRDCAALASNGEYSIADGGVAKYKNYIDTIRQIVVEYSDIRTLLVIEPDSLANLVTNLGTPKCANAQSAYLECINYAVTQLNLPNVAMYLDAGHAGWLGWPANQDPAAQLFANVYKNASSPRALRGLATNVANYNGWNITSPPSYTQGNAVYNEKLYIHAIGPLLANHGWSNAFFITDQGRSGKQPTGQQQWGDWCNVIGTGFGIRPSANTGDSLLDSFVWVKPGGECDGTSDSSAPRFDSHCALPDALQPAPQAGAWFQAYFVQLLTNANPSFL

SEQ ID NO: 599 - DNA, 1518 bp, Trichoderma reesei ATCC 13631
atgtatcggaagttggccgtcatctcggccttcctggctgctgctcgtgctcagcaggtctgcacccaacaagcagagactcacccacctctgacatggcagaaatgcacagcttccggttgcacacctcaacaaggttctgtggttcttgatgcaaactggcgttggactcacgataccaagagcaccaccaactgctacgatggcaacacctggagctcaaccttgtgccccgacgatgcgacttgtgccaagaactgttgtttggatggagccaactactcgggcacttacggagtcaccaccagcggcgacgctctcacccttcaatttgttactgcgtcgaatgtcggctcccgtctttacttgatggcaaatgattctacctaccaggagttcacgctctctggcaatgagttctcctttgacgttgatgtttcccaactgccttgtggcttgaacggagcgctgtacttcgtttccatggacgccgatggtggccagagcaagtaccccggcaatgctgccggtgccaaatacggcacaggttactgtgacagccagtgccctcgtgacctgaagttcatcaacggtcaggccaacgttgagggttgggagccatcttccaacaacgccaacactggtgttggtggccacggaagctgctgctccgagatggatatctgggaggcaaactccatttctgaggctcttactcctcacccttgcgagactgtcggccagacgatgtgcagtggcgattcttgcggtggaacttactccaatgaccgatatggtggcacctgcgaccctgatggctgcgactggaacccataccgtctgggcaacacctccttctacggacccggttcatcattcgctcttgacaccaccaagaaattgaccgttgtgacccagttcgccaccgacggttcaattagccgatactatgtccagaatggagtcaagttccagcagcccaacgctcaagtcggcagctactctggcaacacgatcaacaccgactactgtgcagctgagcagacagccttcggcggaacctcattcacagacaagggcggccttgcccagatcaacaaggcattccagggcggaatggtcttggtcatgagcttgtgggatgattacgcggtcaacatgctttggttggattccacctacccaacaaacgccactgcttccacccctggcgccaagcgaggaagctgctctaccagctctggtgttcccgcccaagtcgaagctcagtcacccaactccaaggttatctactccaacatccgcttcggacccattggcagcactggtggcaacactggcagcaaccctcccggcacttcaaccactcgggctcctccgtccagcactggaagctcccccaccgccacccagacacactacggccagtgtggtggaactggctggaccggacctaccagatgcgctagcggctacacttgccaggttctgaacccattctactctcagtgcctgtaa

SEQ ID NO: 600 - protein, 505 aa, Trichoderma reesei ATCC 13631
  DOMAIN (19)...(445): Glycosyl hydrolase family 7
  DOMAIN (473)...(501): Fungal cellulose binding domain
  SITE (94)...(97): N-glycosylation site. Prosite id = PS00001
  SITE (127)...(130): N-glycosylation site. Prosite id = PS00001
  SITE (287)...(290): N-glycosylation site. Prosite id = PS00001
  SITE (403)...(406): N-glycosylation site. Prosite id = PS00001
  SITE (484)...(511): Cellulose-binding domain, fungal type. Prosite id = PS00562
MYRKLAVISAFLAAARAQQVCTQQAETHPPLTWQKCTASGCTPQQGSVVLDANWRWTHDTKSTTNCYDGNTWSSTLCPDDATCAKNCCLDGANYSGTYGVTTSGDALTLQFVTASNVGSRLYLMANDSTYQEFTLSGNEFSFDVDVSQLPCGLNGALYFVSMDADGGQSKYPGNAAGAKYGTGYCDSQCPRDLKFINGQANVEGWEPSSNNANTGVGGHGSCCSEMDIWEANSISEALTPHPCETVGQTMCSGDSCGGTYSNDRYGGTCDPDGCDWNPYRLGNTSFYGPGSSFALDTTKKLTVVTQFATDGSISRYYVQNGVKFQQPNAQVGSYSGNTINTDYCAAEQTAFGGTSFTDKGGLAQINKAFQGGMVLVMSLWDDYAVNMLWLDSTYPTNATASTPGAKRGSCSTSSGVPAQVEAQSPNSKVIYSNIRFGPIGSTGGNTGSNPPGTSTTRAPPSSTGSSPTATQTHYGQCGGTGWTGPTRCASGYTCQVLNPFYSQCL

SEQ ID NO: 601 - DNA, 1413 bp, Unknown; identical to SEQ ID NO: 521
  Fungal DNA

SEQ ID NO: 602 - protein, 470 aa, Unknown; identical to SEQ ID NO: 522
  Fungal protein
  SIGNAL (1)...(18)
  DOMAIN (22)...(50): Fungal cellulose binding domain
  DOMAIN (120)...(437): Glycosyl hydrolases family 6
  SITE (26)...(53): Cellulose-binding domain, fungal type. Prosite id = PS00562
  SITE (243)...(252): Glycosyl hydrolases family 6 signature 2. Prosite id = PS00656
  SITE (318)...(321): N-glycosylation site. Prosite id = PS00001

SEQ ID NO: 603 - DNA, 1569 bp, Unknown; identical to SEQ ID NO: 523
  Fungal DNA

SEQ ID NO: 604 - protein, 522 aa, Unknown; identical to SEQ ID NO: 524
  Fungal protein
  DOMAIN (18)...(452): Glycosyl hydrolase family 7
  DOMAIN (490)...(518): Fungal cellulose binding domain
  SITE (290)...(293): N-glycosylation site. Prosite id = PS00001
  SITE (321)...(324): N-glycosylation site. Prosite id = PS00001
  SITE (412)...(415): N-glycosylation site. Prosite id = PS00001
  SITE (453)...(456): N-glycosylation site. Prosite id = PS00001
  SITE (461)...(464): N-glycosylation site. Prosite id = PS00001

SEQ ID NO: 605 - DNA, 1638 bp, Unknown
  Fungal DNA
atgaagggttccatctcctaccagatctacaagggggctctcctcctctcctccctgctggcctccgtctcggcccagggcgccggcactctgactgccgagtcccacccggccttgacctggcagaagtgctctgccggtggcagctgcacccccgtcagcggtagtgtcgtcattgacgccaactggcgctgggttcacgacaagaacggcaagaactgctacactggtaacacctgggacgcgaccctgtgtcccgatgacaagacctgcgccgccaactgtgccgtcgacggtgccagctacgcgagcacctacggtgtgaccaccagtggcaactctctgcgcatcaactttgtcacccaagcttcccagaagaacatcggttctcgtctctacctgctggagaacgacaccacttaccagaagttcaacctcctgaaccaggagttcacctttgacgtggatgtttccaacctgccctgcggtctcaacggtgccctctacttcgtcgacatggacgccgatggtggtatggccaagtacccaaccaacaaggccggtgccaagtacggtactggatactgtgactctcagtgcccccgtgacctcaagttcatcaacggtatcgccaacgtcgagggctggactccctcctccaacgaccccaactcgggtgtcggtggccacggtacttgctgtgccgagatggacatttgggaggccaactccatctccgaggccctcactcctcacccttgcgacacccccggccagaccatgtgcgagggcaacgcctgcggtggtacctacagcaacgaccgttacgctggtacttgcgatcctgatgggtgtgacttcaacccgtaccgtcagggtgtgaccaacttctacggtcccggcatgaccgtggacaccaagtctcccttcaccgtggtgacccagttcctcaccgacgacggtacctccaccggtaccctgagcgagatcaagcgcttctacgtccagaacggcaaggtgatcggccagccccagtccaccgtcgccggtgtcagcggtaactccatcaccgactccttctgcaaggcccagaaggccgcctttggcgataccgatgacttcaccaagcacggtgccctggccggtatgggtgccgcctttgaggagggcatggtcctggtcatgagtctctgggatgaccacaactccaacatgctctggctcgacagcacctaccccaccaccgccagctccaccaccctcggtgccaagcgcggctcttgcgacatctcctccggtgctcccaacgacgttgagtcccagaatgccaactcctacgttgtcttctccaacatcaaggctggtcccattggctccaccttcaacagcggctccaccggcggcggcaacggcagcggctccaccaccaccaccaagggttccaccaccaccaccaaggccccaaccaccaccaccactaccagcaaggccaccaccaccactgctgcctctggcggtaacggcggcggtgctgctcactgggcccagcgcggtggtgttggctacaccggtcccaccacctgtgccagcccttacacctgcaccaagcagaacgagtactactcccagtgcctgtaa

SEQ ID NO: 606 - protein, 545 aa, Unknown
  Fungal protein
  SIGNAL (1)...(27)
  DOMAIN (27)...(463): Glycosyl hydrolase family 7
  DOMAIN (513)...(541): Fungal cellulose binding domain
  SITE (139)...(142): N-glycosylation site. Prosite id = PS00001
  SITE (477)...(480): N-glycosylation site. Prosite id = PS00001
MKGSISYQIYKGALLLSSLLASVSAQGAGTLTAESHPALTWQKCSAGGSCTPVSGSVVIDANWRWVHDKNGKNCYTGNTWDATLCPDDKTCAANCAVDGASYASTYGVTTSGNSLRINFVTQASQKNIGSRLYLLENDTTYQKFNLLNQEFTFDVDVSNLPCGLNGALYFVDMDADGGMAKYPTNKAGAKYGTGYCDSQCPRDLKFINGIANVEGWTPSSNDPNSGVGGHGTCCAEMDIWEANSISEALTPHPCDTPGQTMCEGNACGGTYSNDRYAGTCDPDGCDFNPYRQGVTNFYGPGMTVDTKSPFTVVTQFLTDDGTSTGTLSEIKRFYVQNGKVIGQPQSTVAGVSGNSITDSFCKAQKAAFGDTDDFTKHGALAGMGAAFEEGMVLVMSLWDDHNSNMLWLDSTYPTTASSTTLGAKRGSCDISSGAPNDVESQNANSYVVFSNIKAGPIGSTFNSGSTGGGNGSGSTTTTKGSTTTTKAPTTTTTTSKATTTTAASGGNGGGAAHWAQRGGVGYTGPTTCASPYTCTKQNEYYSQCL

SEQ ID NO: 607 - DNA, 1338 bp, Unknown
  Fungal DNA
atgcttacccttgctttcctctccctgctggctgcggccaatgcgcagaaggctggcacgctccagtcggagactcacccgcgtatgacctggtccaggtgctccgccggaggcagctgcaccaccaccaacggcgaggtcgtcatcgatgccaactggcgatggcttcatactgtcagcggttcgcagaactgctacgacggcaacaagtggaccagcgcctgctcctccgagtccgactgcagccagaactgcgccgtcgagggtgccgactactcgggcacctacggcgcgtccacgagcggcaacgccctgacgctcaagttcgtcaccacccaccagtacggcaagaacatcggctcccgcctgtacctcatggccagccagagccagtatcagatgttcaccctgctcaacaacgagctggcttttgatgtcgacctgtcccagatcgagtgcggtctcaatgctgccctctactttgttgccatggacgccgatggcggcatgtcccgtaactcggccaacacggccggcgctaagtttggtactggatactgtgatgctcagtgtgctcgtgatctcaagtttgttggtggcaaggcgaacagtgacggctggaagccctccgacaacgatgccaatgctggcgttggaaagtacggtgcctgctgcgccgagattgatatctgggagtccaacgctcactcctttgccctgactcctcacccttgcaccgagaacacctaccacgtctgcactgactccaactgcggtggaacttattcggacgaccgattcgccggaaagtgcgacgccaacggctgcgattacaacccttaccgcatgggtaataccgacttctacggcaagggcatgactgttgataccaccaagaagttcaccgtcgtgacctcgttccagcgcaacaacatgactcagtacctcgtccagaacggccgcaagttcctcatccccgcccccacggataccagcatctcggacagcagcagcatcacccccgagttctgtgacaatgtcttcaccgccttcgacgaccgcaaccgcttcgaggaggtcggtggctgggaccagctcaacgccgctctgtccattcccatggtgctcgtcatgtccatctgggacgaccactacgccaacatgctctggctcgactccatctacccccctgagaagaagggccagcccggcgctgcccgtggtcggtgccccgagaactctggcgttccctctgaggttgagtctcagtacgccaacgcccaagttgtctggtccaacatccgctggggccccgtcggctcgactgtccgtctctga

SEQ ID NO: 608 - protein, 445 aa, Unknown
  Fungal protein
  DOMAIN (17)...(445): Glycosyl hydrolase family 7
  SITE (315)...(318): N-glycosylation site. Prosite id = PS00001
MLTLAFLSLLAAANAQKAGTLQSETHPRMTWSRCSAGGSCTTTNGEVVIDANWRWLHTVSGSQNCYDGNKWTSACSSESDCSQNCAVEGADYSGTYGASTSGNALTLKFVTTHQYGKNIGSRLYLMASQSQYQMFTLLNNELAFDVDLSQIECGLNAALYFVAMDADGGMSRNSANTAGAKFGTGYCDAQCARDLKFVGGKANSDGWKPSDNDANAGVGKYGACCAEIDIWESNAHSFALTPHPCTENTYHVCTDSNCGGTYSDDRFAGKCDANGCDYNPYRMGNTDFYGKGMTVDTTKKFTVVTSFQRNNMTQYLVQNGRKFLIPAPTDTSISDSSSITPEFCDNVFTAFDDRNRFEEVGGWDQLNAALSIPMVLVMSIWDDHYANMLWLDSIYPPEKKGQPGAARGRCPENSGVPSEVESQYANAQVVWSNIRWGPVGSTVRL

SEQ ID NO: 609 - DNA, 1365 bp, Unknown
  Fungal DNA
atgcatcaacgtgcacttctcttctctgccttttggactgccgtccaggcccagcaggctggaactttgacggcggaaactcacccttctttgacctggcaaaagtgtgctgctggtggcagttgcaccgagcagaaaggctctgttgtgctcgattccaactggcgttggctgcactctgttgatggctctactaactgttacactggcaacacttgggatgccagcctctgccctgataacgaagcctgcgcttccaactgtgctctggatggagctgactatgagggcacttacggtgttaccaccagcggcgatgccttgtccctccagtttgtcaccggcgccaatatcggctctcgtctgtacctgatggcagacgaagagtcataccagacgttcaatctcttgaacaatgagttcacttttgatgttgacgcttcccagcttccttgtggcttgaacggtgccgtttacttcgtcgccatggacgccgacggcggtgtcgccaagaacccaaccaacaaggctggtgccaagtatggaactggctactgtgattcccagtgcccacgagacttgaagttcatcaacggccaggccaacgtggaaggatggacgccttccgacagcgacaagaatgccggtgttggtggccacggttcctgctgccccgagatggatatctgggaagccaacagcatctccacggcctacacaccccatccttgcgatgataccactcagaccatgtgtgaaggtgacgcttgtggaggaacttactccggggatcgttatggaggaacttgcgaccctgatggttgtgacttcaacgcttaccgcatgggtaatgaatctttctatggccccggccagctcgtcgactcttcctcccctgttaccgtggtgacccaattcatcactgccgacggcaccgagtcaggcgccttgtcggagatcaagcgtttctacgtgcagggcggtaaggtcatcgccaatgccgcgtcgaacgttgaaggtgtcactggtaactcgatcaccaccgacttctgcactgctcagaagacggcattcggcgatgacgacatcttcacgcagcacggcggactccagggtatgggcaacgccttgtcctccatggtcctgaccctcagtatctgggatgaccactatgccagcatgatgtggctggacagcagctacccagaagacgctgacgcaagcacccccggtgtcgctcgtggcacctgcgagcaacacgccggtgaccctgagaaggtcgagtcggcgcacggcagtgccacagtgacctactctaacatcaagtttggtccgatcggctctactttcgacgctccagcctaa

SEQ ID NO: 610 - protein, 454 aa, Unknown
  Fungal protein
  DOMAIN (19)...(452): Glycosyl hydrolase family 7
  SITE (288)...(291): N-glycosylation site. Prosite id = PS00001
MHQRALLFSAFWTAVQAQQAGTLTAETHPSLTWQKCAAGGSCTEQKGSVVLDSNWRWLHSVDGSTNCYTGNTWDASLCPDNEACASNCALDGADYEGTYGVTTSGDALSLQFVTGANIGSRLYLMADEESYQTFNLLNNEFTFDVDASQLPCGLNGAVYFVAMDADGGVAKNPTNKAGAKYGTGYCDSQCPRDLKFINGQANVEGWTPSDSDKNAGVGGHGSCCPEMDIWEANSISTAYTPHPCDDTTQTMCEGDACGGTYSGDRYGGTCDPDGCDFNAYRMGNESFYGPGQLVDSSSPVTVVTQFITADGTESGALSEIKRFYVQGGKVIANAASNVEGVTGNSITTDFCTAQKTAFGDDDIFTQHGGLQGMGNALSSMVLTLSIWDDHYASMMWLDSSYPEDADASTPGVARGTCEQHAGDPEKVESAHGSATVTYSNIKFGPIGSTFDAPA

SEQ ID NO: 611 - DNA, 1158 bp, Unknown
  Obtained from environmental sample
gtgctgatccggctggcggcggccggcgccctgctgctcggcgccgtcttcgtcgcggtgagcccggcggccgcggccaccgcctgcgacgtcacctacaccgccaaccagtggagcaccggcttcaccgccgacgtgcgggtcaccaacaacggcgcgccgatcaacggctgggcggtgacctggacgttcaccggcaaccagcaggtcacctccggctggaacgcgcagctgacccagtccggggccacggtgacggccgcggcgccgtcctacaaccagaccctggccaccggggcctcggccggcttcggcttccaggcgacgtactcgggcagcaacccggcgccggcgtccttcgccctcaacggcgtctcgtgcaacggcgaagccccaccgacgtcggccccaccgacgccgagcacgccgccgacctcgatcccgccgtctcccagcaccccaccgaccacgaccccgccgccggccggctgcaccaccggggtccgctgtgacggcttcgagggcacccaggccgactgggcggtgacctacccggactgctccggcgcgggcaaggcggccttcgacaccgcagtcgcccacggcggcggcacctcgctgcggatcgacggggcggcgggttactgcaaccacgtcttcatgcggaacaccgcgctgatcccggtcggggccaccgcgctgttcgtgcgctactgggtgcggcacaccaccgcactgccggccgcgcacaccacggcggtggcgttgcgggacgccaacgacggccaccgggacctgcgcttcggcggccagaacggcgccctgcaatggaaccgggcgtccgacgacgccacgctgccggaacagagcccggccggggtggcgttgtccgcgccgctgccgacgggcacctggaactgcgtggagttcaaggtcgaccagggcaacggcacgatgcagacctggctcaacggcacatccgtgcccggcctgctgcaggacggcgtgccgacgcacgacatcgacggccagtggctgaacaagacctggcggccggccctgaccgacctgcggctgggctgggagagctacggcgaaggcgcagacaccctctggtacgacgacgtcgccgtgggcaccacccgcgtcggctgctga

SEQ ID NO: 612 - protein, 385 aa, Unknown
  Obtained from environmental sample
  DOMAIN (29)...(127): Cellulose binding domain
  SITE (94)...(97): N-glycosylation site. Prosite id = PS00001
  SITE (320)...(323): N-glycosylation site. Prosite id = PS00001
  SITE (352)...(355): N-glycosylation site. Prosite id = PS00001
MLIRLAAAGALLLGAVFVAVSPAAAATACDVTYTANQWSTGFTADVRVTNNGAPINGWAVTWTFTGNQQVTSGWNAQLTQSGATVTAAAPSYNQTLATGASAGFGFQATYSGSNPAPASFALNGVSCNGEAPPTSAPPTPSTPPTSIPPSPSTPPTTTPPPAGCTTGVRCDGFEGTQADWAVTYPDCSGAGKAAFDTAVAHGGGTSLRIDGAAGYCNHVFMRNTALIPVGATALFVRYWVRHTTALPAAHTTAVALRDANDGHRDLRFGGQNGALQWNRASDDATLPEQSPAGVALSAPLPTGTWNCVEFKVDQGNGTMQTWLNGTSVPGLLQDGVPTHDIDGQWLNKTWRPALTDLRLGWESYGEGADTLWYDDVAVGTTRVGC

SEQ ID NO: 613 - DNA, 1995 bp, Unknown
  Obtained from an environmental sample
atggttcagctctacatcaaaaacggctttccggccggttacgaacacggacccgtcgctacctttaacgttccgatggtagtcaacggcaccctgataaaccagacctttgagctttacgacgttgtcgctgatcccggctggaggttcctgacgtttaaatcaaccaaaaactacgtcaacgcgagcgttgtttttgactacacccacttcatcgagatggccaacgactatctaaacgactcgctgaacagtacttacctcatgtccctggagtttggaaccgagatctacaccaacgggataagttccttcccagggaccgttgatgtagaatggagcttaaacgactattactacgccctggcacccaggggactcacggcggaggatgctttgggaatgtgggcagctcttattcccaacaccggaaacacctccaacggaggaacggaagaaagtggtgaagataacaccggtggcaccaatggaacaaccagcaccaccgaaagcgaaaccgttgtgctaacctatccggatgacggccagtggccgacggcttacattgacgggaacaagaacggcgtccccgattacgttatggagatcaacccctggaacattcagagtgccgatggaaaagcggtgatgcggtacaactactcgaccggttacctgcactactcacaggatctcagtaacatagtaataagaaacgccggcggctgggttcatggatatccagagatctggtacgggaacaagccatggaacgagtacaacgccaccgatggagaggtgcctttgccaggacaagttgggaagctcaacaacttctacgtaactgtaaactacaacctcacccacgaaaacggtctgcctgttgaccttgcgatagagtcgtggctgacgagggataagtggcgctcaaccgggataaagagcgatgagcaggagctcatgatatggctctactacgatggcctccagccagccggttcaaaggtgggggagataacggttcccataatagttaacggagttgagaaaaacgcaaccttcgaagtttggaaaggcaacattggatgggagtacgtggccttcaggataaaaacgccgcttccttcggccaacgtaacccttccctacggtcccttcatcagtgccgccatgaacgtgacatcgctgaaggattacgcctcgctttaccttgaggacgtggaggttggaaccgagttcggaagtccaagcgtcacatctgcaaaacttgagtggactttctatgagttcaaactaacctacacagacgggccattgataaccaacgtttcggtatctgcaggtggctccaactcgggcaattccaacggtattaatggaaaccagtctgccacctccggaaacctgacggtaagccttaagaacgcctggggaggtggcgctcagtacagcgttaacataaccctcgatggaaaggctgtgtggagggttctcctcaggataaaggacggcagtgttgttgattcatggggtggaaaggtcactggaatgaacggaagctacgttgttattgaggccgaggactacaacctggggccaaaggcggttttgggctttgttacgtccggagctgcaccaatagtgcaggaagccctcctgcttgtcaacggggaagtcgtggcaaggtgggaggcacctgttgagaggcctgcgctggaagtggatggatacgttgacagtgaatggaacgacgggttcgtgtacaaaataaggataaccaacaggggaagcgctccagttgcagggtggactttgacactctcaatgacgagcgagatagtgagcatctggggagcgacctacgagagacttcctgacggaacgatagtccttaaaccgatggactacacctcggtaatagctccgggacagagcgttgagataggctttcaggctaagaaggcaggagatataccatatccaaggatagtttaa

SEQ ID NO: 614 - protein, 664 aa, Obtained from an environmental sample
  DOMAIN (265)...(435): Glycosyl hydrolase family 12
  DOMAIN (572)...(652): Carbohydrate binding domain CBM49
  DOMAIN (572)...(662): Cellulose binding domain
  SITE (29)...(32): N-glycosylation site. Prosite id = PS00001
  SITE (34)...(37): N-glycosylation site. Prosite id = PS00001
  SITE (61)...(64): N-glycosylation site. Prosite id = PS00001
  SITE (81)...(84): N-glycosylation site. Prosite id = PS00001
  SITE (85)...(88): N-glycosylation site. Prosite id = PS00001
  SITE (147)...(150): N-glycosylation site. Prosite id = PS00001
  SITE (165)...(168): N-glycosylation site. Prosite id = PS00001
  SITE (223)...(226): N-glycosylation site. Prosite id = PS00001
  SITE (265)...(268): N-glycosylation site. Prosite id = PS00001
  SITE (290)...(293): N-glycosylation site. Prosite id = PS00001
  SITE (356)...(359): N-glycosylation site. Prosite id = PS00001
  SITE (383)...(386): N-glycosylation site. Prosite id = PS00001
  SITE (398)...(401): N-glycosylation site. Prosite id = PS00001
  SITE (448)...(451): N-glycosylation site. Prosite id = PS00001
  SITE (468)...(471): N-glycosylation site. Prosite id = PS00001
  SITE (475)...(478): N-glycosylation site. Prosite id = PS00001
  SITE (493)...(496): N-glycosylation site. Prosite id = PS00001
  SITE (525)...(528): N-glycosylation site. Prosite id = PS00001
MVQLYIKNGFPAGYEHGPVATFNVPMVVNGTLINQTFELYDVVADPGWRFLTFKSTKNYVNASVVFDYTHFIEMANDYLNDSLNSTYLMSLEFGTEIYTNGISSFPGTVDVEWSLNDYYYALAPRGLTAEDALGMWAALIPNTGNTSNGGTEESGEDNTGGTNGTTSTTESETVVLTYPDDGQWPTAYIDGNKNGVPDYVMEINPWNIQSADGKAVMRYNYSTGYLHYSQDLSNIVIRNAGGWVHGYPEIWYGNKPWNEYNATDGEVPLPGQVGKLNNFYVTVNYNLTHENGLPVDLAIESWLTRDKWRSTGIKSDEQELMIWLYYDGLQPAGSKVGEITVPIIVNGVEKNATFEVWKGNIGWEYVAFRIKTPLPSANVTLPYGPFISAAMNVTSLKDYASLYLEDVEVGTEFGSPSVTSAKLEWTFYEFKLTYTDGPLITNVSVSAGGSNSGNSNGINGNQSATSGNLTVSLKNAWGGGAQYSVNITLDGKAVWRVLLRIKDGSVVDSWGGKVTGMNGSYVVIEAEDYNLGPKAVLGFVTSGAAPIVQEALLLVNGEVVARWEAPVERPALEVDGYVDSEWNDGFVYKIRITNRGSAPVAGWTLTLSMTSEIVSIWGATYERLPDGTIVLKPMDYTSVIAPGQSVEIGFQAKKAGDIPYPRIV

SEQ ID NO: 615 - DNA, 1545 bp, Unknown
  Fungal DNA
atgtatcgcgtcatcgcaaccgcctcggctcttattgccactgctcgggctcaacaggtctgctctttgaccaccgagaccaagcctgccttgacctggtccaagtgtacatccagcggctgcagcgatgtcaagggctccgttggtattgatgccaactggcgatggactcaccagacttctggatctaccaactgttacaccggaaacaagtgggacacctccgtctgcactgatggtaagacctgcgccgagaagtgctgtcttgatggcgccgactatgctggcacctacggaatcacttccagcggcaaccagctcagtcttggattcgttacccagggtccctacagcaagaacatcggcagccgaacataccttatggagaacgagaacacctaccagatgttccagcttctgggtaacgagttcacctttgacgtcgatgtctctggtatcggctgcggtctgaacggtgcactctacttcgtcagcatggacgaggatggtggcaaggccaggtactccggaaacaaggccggagccaagtacggaactggctactgtgatgctcaatgccctcgtgatgtcaagttcatcaacggagttgccaactctgaaggctggaagccctctgacagtgatgctaacgctggtgttggcaatctgggcacctgctgccccgagatggatatctgggaggccaactccatctcaaccgccttcactcctcatccttgcaccaagctcacgcagcactcttgcactggcgactcttgtggtggaacctactctagtgaccgatatggcggtacttgcgatgccgatggttgtgacttcaacgcctaccgccagggcaacaagaccttctacggtcctggatccaacttcaacgttgataccaccaagaagatgactgtcgtcactcagttccacaagggcagcaacggacgtctttctgagatcacccgtctgtatgtccagaacggcaaggtcattgccaactccgagtccaagatttcaggcaaccccggtagctctctcacctctgacttctgctccaagcagaagagcgtctttggcgatatcgatgacttctctaagaagggtggctggaacggcatgagcgatgctctctccgcccccatggttcttgttatgtctctctggcacgaccaccactccaacatgctctggctcgactctacctacccaactgactctaccaaggtcggatcccagcgaggttcttgcgctaccacctctggcaagccctccgaccttgagcgagatgttcccaactccaaggtttccttctccaacatcaagttcggtcccatcggaagcacctacaagagcgacggcaccacccccaacccccctgccagcagcagcaccactggttcttccactcccaccaacccccctgccggcagcgtcgaccagtggggacagtgcggtggccagaactacagcggccccacgacctgcaagtctcccttcacctgcaagaagatcaacgacttctactcccagtgccagtaa

SEQ ID NO: 616 - protein, 514 aa, Unknown
  Fungal protein
  DOMAIN (19)...(453): Glycosyl hydrolase family 7
  DOMAIN (482)...(510): Fungal cellulose binding domain
  SITE (291)...(294): N-glycosylation site. Prosite id = PS00001
  SITE (493)...(520): Cellulose-binding domain, fungal type. Prosite id = PS00562
  SITE (497)...(500): N-glycosylation site. Prosite id = PS00001
MYRVIATASALIATARAQQVCSLTTETKPALTWSKCTSSGCSDVKGSVGIDANWRWTHQTSGSTNCYTGNKWDTSVCTDGKTCAEKCCLDGADYAGTYGITSSGNQLSLGFVTQGPYSKNIGSRTYLMENENTYQMFQLLGNEFTFDVDVSGIGCGLNGALYFVSMDEDGGKARYSGNKAGAKYGTGYCDAQCPRDVKFINGVANSEGWKPSDSDANAGVGNLGTCCPEMDIWEANSISTAFTPHPCTKLTQHSCTGDSCGGTYSSDRYGGTCDADGCDFNAYRQGNKTFYGPGSNFNVDTTKKMTVVTQFHKGSNGRLSEITRLYVQNGKVIANSESKISGNPGSSLTSDFCSKQKSVFGDIDDFSKKGGWNGMSDALSAPMVLVMSLWHDHHSNMLWLDSTYPTDSTKVGSQRGSCATTSGKPSDLERDVPNSKVSFSNIKFGPIGSTYKSDGTTPNPPASSSTTGSSTPTNPPAGSVDQWGQCGGQNYSGPTTCKSPFTCKKINDFYSQCQ

SEQ ID NO: 617 - DNA, 1581 bp, Unknown
  Fungal DNA
atgttctccaagactgctcttctgtcttccatcttcgccgctgcggcaacggcccagcaggtcggcacccttaccaccgagacccatccttcactgccaatgcagagctgcactgctgctggatcctgtacgactatcaatacggcggtgaccttggatgccaactggagatggctccacacaaccagcggctataccaactgctacactggcaacgcttggaacaccacgctttgccccgatggcaagacgtgtgctgctaactgtgccctcgacggcgccgattatcctggcacatacggtgtgactgctagtggcaatgctctcaagctcaacttcgtgaccaacggacagtactccaagaacattggctcgcggttgtacctcatggcctcggattccaagtaccagatgttcaagctattgaaccgggagttcacattcgacgtcgatgtctccaacctgccatgtggtctgaacggggccctttaccttgtcgagatggacgaggatggcggaatggccaagtattccaccaacaaggctggtgccaagtacggaactggctattgtgatacccaatgcccgcacgacatcaagttcatcaacggcgaggctaatgtggacggatggacaccgagctccaacgatgccaacgctggaaccggtacttacggatcttgctgccacgaaatggatatctgggaggcgaattccatctcagccgcctacactcctcacgtatgcagcaaggatggccaagtgcgctgctccggcattgactgcggagacggcgacaaccgctacaagggtatctgtgacaaggatggctgcgatttcaacagctaccgcatgggtgataaatccttctacggcaagggcctgaccgtcgacacgtctagcaagttcactgttgtcactcagttcatcaccaatgacggcaccgacacgggcacgctctccgaaattcgccgtatctacgtccagaatggcaaggtcatccagaacagcaataccaagattactggcgttaccaccaccaactccatcactgacaagttctgcacggagcagaagaccaccttcggcgataccaacaccttcagctccatgggcggcctaaagacgatgggtggaccccttggccgtggtatggtcctcgccctctccgtctgggacgaccactcagtcaacatgctctggcttgactccacctaccccaccgacaagagtgccgacactcccggcgtcggtcgcggtacctgcgcaatcacttccggtgttccgtctgacatcgaaacctcggctgccagctccagcgtcacctactcgaatatcaaggttggaaagctgaactcgacctacaccggcacctctactaacccctccaacccatcttcctctgccaagccagcctcgtcttccacttccgcaactggctccaccccatctaacccatctactggcggaaccgtcgctaagtggggacagtgcggtggcatcggatactctggcgccacaacttgcgtctctggaagcacctgccacaagatcaacgactactacagccagtgctactaa

SEQ ID NO: 618 - protein, 526 aa, Unknown
  Fungal protein
  SIGNAL (1)...(18)
  DOMAIN (20)...(457): Glycosyl hydrolase family 7
  DOMAIN (494)...(522): Fungal cellulose binding domain
  SITE (76)...(79): N-glycosylation site. Prosite id = PS00001
  SITE (458)...(461): N-glycosylation site. Prosite id = PS00001
MFSKTALLSSIFAAAATAQQVGTLTTETHPSLPMQSCTAAGSCTTINTAVTLDANWRWLHTTSGYTNCYTGNAWNTTLCPDGKTCAANCALDGADYPGTYGVTASGNALKLNFVTNGQYSKNIGSRLYLMASDSKYQMFKLLNREFTFDVDVSNLPCGLNGALYLVEMDEDGGMAKYSTNKAGAKYGTGYCDTQCPHDIKFINGEANVDGWTPSSNDANAGTGTYGSCCHEMDIWEANSISAAYTPHVCSKDGQVRCSGIDCGDGDNRYKGICDKDGCDFNSYRMGDKSFYGKGLTVDTSSKFTVVTQFITNDGTDTGTLSEIRRIYVQNGKVIQNSNTKITGVTTTNSITDKFCTEQKTTFGDTNTFSSMGGLKTMGGPLGRGMVLALSVWDDHSVNMLWLDSTYPTDKSADTPGVGRGTCAITSGVPSDIETSAASSSVTYSNIKVGKLNSTYTGTSTNPSNPSSSAKPASSSTSATGSTPSNPSTGGTVAKWGQCGGIGYSGATTCVSGSTCHKINDYYSQCY

SEQ ID NO: 619 - DNA, 1395 bp, Unknown
  Fungal DNA
atgcagagaacatcagcttgggcactgctccttctggcgcagattgccactgctcagcagaccgtctggggacaatgtggtggtatcggctactctggaccgaccagctgtgttgcaggatcttcttgtagcacccagaactcttactacgctcaatgtctcccaggcagtggaaacggcggtggcggtgcggcaaccacgaccacgactgctggacaaaccaccaagaccaccatggccaccaccaccaccacttcaaccaagacctcagctggtagtggcggcagcaccactactgctcctcctgctagcaacagtggcaaccccttcaagggataccagccttacgtgaacccgtactacgcttccgaggttcagagcctggctattccctctctggcagcctctctggcgcccaaggccagcgcggtggccaaggtcccatccttcgtttggctggacactgctgctaaggtccctactatgggcacttacttggcagacatcaaggccaagaacgcggctggtgctaacccacccattgccggtatctttgtcgtttacgatcttcctgaccgtgactgcgctgctcttgccagtaacggcgagtactccatcgccaacggcggtgttgccaactacaagaagtacattgactcgatccgcgctcagcttctcaagtaccctgatgtgcacaccatcctggtcatcgaacccgacagtctcgccaacctggtcaccaacatgaacgtcgccaaatgctcgggtgctcacgacgcctacctggagtgcactgactatgcactcaagcagctcaacttgcccaacgttgccatgtaccttgatgccggacacgctggctggcttggatggcccgccaacattggacccgctgccgacctcttcgccagtgtgtacaagaatgccggctctcccgccgccgtccgtggattggccaccaacgttgccaactacaacgcctggtccatctccacctgcccatcttacactcagggtgaccagaactgtgacgagaagcgctacatcaacgccctcgctcctctcctccgcgcgaacggcttcgacgcccacttcatcatggacacctcccgtaacggtgttcagcccactaagcaacaagcctggggtgactggtgcaacgtcattggcactggcttcggtacccccttcaccaccgacactggtgatgctcttcaggacgctttcatctgggtcaagcccggtggtgagtgtgacggtacctcggacacatcctctcctcgctacgacgcccactgcggatacagcgatgccctcaagccggcccccgaggctggaacttggttccaagcctacttcgagcagctgctcgtcaacgccaacccaagcttctaa

SEQ ID NO: 620 - protein, 464 aa, Unknown
  Fungal protein
  SIGNAL (1)...(18)
  DOMAIN (22)...(50): Fungal cellulose binding domain
  DOMAIN (117)...(431): Glycosyl hydrolases family 6
  SITE (26)...(53): Cellulose-binding domain, fungal type. Prosite id = PS00562
  SITE (237)...(246): Glycosyl hydrolases family 6 signature 2. Prosite id = PS00656
MQRTSAWALLLLAQIATAQQTVWGQCGGIGYSGPTSCVAGSSCSTQNSYYAQCLPGSGNGGGGAATTTTTAGQTTKTTMATTTTTSTKTSAGSGGSTTTAPPASNSGNPFKGYQPYVNPYYASEVQSLAIPSLAASLAPKASAVAKVPSFVWLDTAAKVPTMGTYLADIKAKNAAGANPPIAGIFVVYDLPDRDCAALASNGEYSIANGGVANYKKYIDSIRAQLLKYPDVHTILVIEPDSLANLVTNMNVAKCSGAHDAYLECTDYALKQLNLPNVAMYLDAGHAGWLGWPANIGPAADLFASVYKNAGSPAAVRGLATNVANYNAWSISTCPSYTQGDQNCDEKRYINALAPLLRANGFDAHFIMDTSRNGVQPTKQQAWGDWCNVIGTGFGTPFTTDTGDALQDAFIWVKPGGECDGTSDTSSPRYDAHCGYSDALKPAPEAGTWFQAYFEQLLVNANPSF

SEQ ID NO: 621 - DNA, 2412 bp, Unknown
  Obtained from environmental sample
atgcatcacgattcaaacgataccaccagcacccgccgccgcttcctggccacggtggccgccgccggcgccgccggcgccacgtcgaacctggcattcgccgcgccggcccgcccgctgtacaaggacccggccgcgccggtgccaaagcgcgtcgacgacctgctgaaacgcatgacgctcgatgaaaagatcgcgcagatgctgtgcgtgtggatcgaaaaaggcaagatcgaggacaacggcgccttctcggcggccaaggcggcccaggtgtacccgaacggcatcggcatggtggcgcggccatcggaccggcaaggcaagtccgatgccggcgccgccgcggcggccggcgacgatggcgcgcggccgaaccgcggcgcgcaggaaacggcgcagtacgtgaacgccgcgcagaagtgggccgtcgagcagacgcgcctgggcattccgctgttcatgcacgaggaagcgctgcacggctatgcggcgcgcgacgccacgtcgttcccgcaggcgatcggcctggcatcgtcgttcgatcccgagctggtgacgcgcgtattcgcggtggcggcgcgcgagatgcgcgcccgcggcgccaacttcgcgctggcgcccgtggtggacgtggcgcgcgagccgcgctggggccgcatcgaggaaaccttcggcgaggatccgcacctgtgcgcggaaatcggcaaggccgccgtgatcggcttttccggcaccacgcgccagctggcgaaggacaaggtgctgacgacgctcaagcacatgaccggccacggccagcccgaatcgggcaccaacatcggcccggccgaagtctccgaacgcacgctgcgcgaggaattcttcccgccgttcgaacgcctggtgcgcgagaccacggtggcggcgatcatgccttcgtataacgagatcggcggcgtgccgtcgcacgccaaccgctggatgctcgatggcgtggcgcgcaaggaatggggcttcaagggcgtgatggtgtccgactacatgggcatccgcgaactggtcacgcgccacaggatggcggccacgccgaaggaagccggctattacgccgtcaaggccggcgtggacatcgaaacgccggacggccacggctatcgccacctggccgaactggtcagggaaggcaaggtcgccgagaaggaaatcgatgcgatggtgcgccgtatcctggagctgaaattcctggccggcttgttcgagaatccgtatgccgacgcggccagcgccgacgcgcaaacggccaccgccgccgacgtggcgctggcccgcgaagcggccggccgctcggtggtgctgctgaagaacgacaagggcgtgctgccgctgcagccgaagaaggtgggcaagctgctgctgctcggcacgcacgcgaaggatacgccgatcggcggctactcggacattccccgcaaggtagtgtcgctgcatgaagcgctggccgccgaagcgcaggcgcagggtttcgcctttgactaccgggaaggcgtgcgcatcaccgaggaacgcatctggggcaaggacgagatcaagttcacggcgccggaagtcaatgcgcggctgatcgcggaagcggtggcggcggcgaaatcggccgacacgatcgtgatggttctcggcgacaacgagcagaccagccgcgaagcgtgggccgacgggcacctgggcgatcgcgccacgctcgacctgatgggccagcagaacgacctggccaaagccatcttcgacctgggcaagcccaccatcgtgttcctgctcaatggccggccgatgtcgatcaacctgctcgccgagcgggccgatgcgatcatcgaaggctggtacctgggccaggaaacgggcaatgcggcggcggacgtgctgttcggccgcgtcaacccgggcggcaagctgccggtatcgatcgcgcgcaacgtgggccagttgccgatcttctacaaccacaagccttcggcgcggcgcggctacatcgacggcagcaccaagccgctgtatccgttcggcttcggcctgtcgtacacgaagttcgacatcgccgcgccacgcctgaaaaaggccacgatccggcgggacgaatcgacgcaggtcgaggtcgacgtgacgaacacgggcgcgctggccggtgatgaagtcgtgcagatctatatccgcgacgatatttcctccgtcacgcgccccgtgctggaactgaaggcgttccggcgcgtgacgctgcagccgggcgagaagaaaaccctggtgttcgacatccggccggccgacctggcgttttacaacgtcgacatgaagcgcgttgtcgaaccgggcagcttcacgatccacgcggggccggacagcgcccagctgaaatcggtcaagctgctggttggctga

SEQ ID NO: 622 - protein, 803 aa, Unknown
  Obtained from environmental sample
  SIGNAL (1)...(34)
  DOMAIN (143)...(374): Glycosyl hydrolase family 3 N terminal domain
  DOMAIN (444)...(688): Glycosyl hydrolase family 3 C terminal domain
  SITE (6)...(9): N-glycosylation site. Prosite id = PS00001
  SITE (725)...(728): N-glycosylation site. Prosite id = PS00001
MHHDSNDTTSTRRRFLATVAAAGAAGATSNLAFAAPARPLYKDPAAPVPKRVDDLLKRMTLDEKIAQMLCVWIEKGKIEDNGAFSAAKAAQVYPNGIGMVARPSDRQGKSDAGAAAAAGDDGARPNRGAQETAQYVNAAQKWAVEQTRLGIPLFMHEEALHGYAARDATSFPQAIGLASSFDPELVTRVFAVAAREMRARGANFALAPVVDVAREPRWGRIEETFGEDPHLCAEIGKAAVIGFSGTTRQLAKDKVLTTLKHMTGHGQPESGTNIGPAEVSERTLREEFFPPFERLVRETTVAAIMPSYNEIGGVPSHANRWMLDGVARKEWGFKGVMVSDYMGIRELVTRHRMAATPKEAGYYAVKAGVDIETPDGHGYRHLAELVREGKVAEKEIDAMVRRILELKFLAGLFENPYADAASADAQTATAADVALAREAAGRSVVLLKNDKGVLPLQPKKVGKLLLLGTHAKDTPIGGYSDIPRKVVSLHEALAAEAQAQGFAFDYREGVRITEERIWGKDEIKFTAPEVNARLIAEAVAAAKSADTIVMVLGDNEQTSREAWADGHLGDRATLDLMGQQNDLAKAIFDLGKPTIVFLLNGRPMSINLLAERADAIIEGWYLGQETGNAAADVLFGRVNPGGKLPVSIARNVGQLPIFYNHKPSARRGYIDGSTKPLYPFGFGLSYTKFDIAAPRLKKATIRRDESTQVEVDVTNTGALAGDEVVQIYIRDDISSVTRPVLELKAFRRVTLQPGEKKTLVFDIRPADLAFYNVDMKRVVEPGSFTIHAGPDSAQLKSVKLLVG

SEQ ID NO: 623 - DNA, 1293 bp, Unknown
  Obtained from environmental sample
atgaaacgattgctttgttccttattactggcactctcgcttgttacctacgcccagccgcatatgggcttagcagaagtacccttgcagcctaatgtatcacttcctggcgtatcggcgcaaaggctggctcgcatcgatgggctgctgcaggagtatgtaagcaaaggctggctgcccggcgccgtggccctggtggcaaaagacggcaagatcatttaccataaagcttttggctacagcagcctcgaaacccctacctcgcttcagaaagatgccatcttccgcattgcctcgcaaacaaaagccatcacctcggtaggcatcatgatgctgtgggaagaaggcaagctcgggctcgatgaaccagtttcccgctacattcccgagtttaagaatcctaaagtgctccttgctttcaacgcatccgattcttcttatacaacggttccggccaaaggcgaggtaaccatccgccagttgcttacccatacttccggtattggttatgcacaaattggctcgccggagatgaatgcactgtatgcaaaagccggcgtggtgggcggcattggggtaggcgccattaccctggccgataaaataaaaatattgggcggcctgccgctttttcatcagcccggcgaaaagtggacctatggccttagtaccgatgtgctgggttatgtaatagaagtggtaagcggccgcaacctggaccagttttttgccgagcgcatctttaagccgctgggcatgcaggatacttacttttaccttcccgaaagcaaaagaagccggcttgtaaaattgtattcggaagataagagcaagaaacttgttaaggccagttccgagatgagtcttaatggagcattcaatcccgattacccggcatcggcaggcacctatttttcgggcggcggcggcctgtcggctacggctttggattatgccatttttatgcagatgctgctcaacggcggcacgtacaacggggtacggcttttggccccggccacggtacggctgatgaccaccaaccaggttggcgataaaaccatcgggcggggcaataaatttgggcttggctttgagctggtaaccgaagaaagcaagtgggctacgccgctttcggcaggcagtttttcgtggggtggcatgttttcttcttcgtactggattgatccaaaagaaaaaattgtggcccaactgtttttaaacctttaccccaacagccatggcgaagtgcacgataagtttaagacaatggtgtatgcagcgctggagtga

SEQ ID NO: 624 - protein, 430 aa, Unknown
  Obtained from environmental sample
  SIGNAL (1)...(18)
  DOMAIN (46)...(428): Beta-lactamase
  SITE (32)...(35): N-glycosylation site. Prosite id = PS00001
  SITE (143)...(146): N-glycosylation site. Prosite id = PS00001
MKRLLCSLLLALSLVTYAQPHMGLAEVPLQPNVSLPGVSAQRLARIDGLLQEYVSKGWLPGAVALVAKDGKIIYHKAFGYSSLETPTSLQKDAIFRIASQTKAITSVGIMMLWEEGKLGLDEPVSRYIPEFKNPKVLLAFNASDSSYTTVPAKGEVTIRQLLTHTSGIGYAQIGSPEMNALYAKAGVVGGIGVGAITLADKIKILGGLPLFHQPGEKWTYGLSTDVLGYVIEVVSGRNLDQFFAERIFKPLGMQDTYFYLPESKRSRLVKLYSEDKSKKLVKASSEMSLNGAFNPDYPASAGTYFSGGGGLSATALDYAIFMQMLLNGGTYNGVRLLAPATVRLMTTNQVGDKTIGRGNKFGLGFELVTEESKWATPLSAGSFSWGGMFSSSYWIDPKEKIVAQLFLNLYPNSHGEVHDKFKTMVYAALE

SEQ ID NO: 625 - DNA, 2358 bp, Unknown
  Obtained from environmental sample
atgaagaagagagcttttagctttagtctttgtgttgccattatttcgactttctggttgcctgttgcacacatgagctcgcaagacaatcagccggactacaaaaacccgcgtcttccggtcgataggcgcgtcgcggacttgctgtcgcgcatgacgctcgaagaaaaagtggcgcagttggtctgtctctggggtagccggccgcaagttaatccgcaaaccaatttcgccaccgatcgcggtgacttttctcccgcaaaagcggcggaagtcatgaagcacggcatcggccagatcgcgcgccaacgagaacgtaaagatccgcgccagggcgcgacgttcgccaacgcggtgcagaagtggttgatcgaaaacacgcggctcggaatcccagcgattcttcacgacgagatacttcacggccatatggccaaaggcagcacgagcttcccgcagccgatcgcactcgctacaacctgggacccggacttcatcacgaaagtctttacggcgggcgcgctcgagacgcgggcgcgcggaagtcatcaagtgcttggtccaaacctcgacctggcccgcgacgctcgctggggacgaactgaagagacctacggcgaagatccctatctcacgtcgcgcatggccgtcgcgatcgtgcgcgctttgcagggacccggaccgggtgtcgacggcgatcacgtcatcgccacggccaaacactttgcggcccacggccaaccggagagcggcaccaacatcgcgcccgtaaatttttcagaacgaacgttgcgcgaatacttcctgccgagcttcaaagcggcggtgactgaggccggcatcatgagcgtgatgccttcgtacaacgagatcgacggcgtgccgtctcacgctaacaagtggctgttgcaagacctcctgcgcgaagaatggggcttcgacggtcacgtcgtctccgactactacgcgattccgcaaatgatggatctgcatcgcatcgccggtgataaagcagcgactgcgaagctcgcaatcgaggccggcgtcgacaccgaacttccggatcctgattcgttcccgactctcttgcgcttggtgaaagagggacaggtctcggaagcgacgctcaatcgagcggtcgcgcgtaacctgcgcgcgaagtttctgctcggattgtttgagaacccgtacgtcgacgtcgaacgtgctgtgcggatcacgaactcgagcgaacaccgggcgttggcggctgaagcggcgcgcagatcgatcacgctgctgaagaaccaaaacaacctgctgccgttgaaccgaaacactctgaaatcgatcgcggtgattggcccaaacgccgcgcaggtccatctcggcggatacagtgatcagccaggccgcggcgtcagtgtggtccagggtatcaaagacaaggtaggcggctcgatcaaggtcgcgtacgccgaaggctgcaagataaccaaagaaggcggcgattggttcgccgataccgctactctcagcgatccggctgaggatcgaaagttgatcgccgaagctgtgcaagtggcaaagacagccgacgttgcgctgctcgtactcggcggcaacgaagacacgaacaaagaaggctgggccgacaatcatctcggcgatcgcgatagtctcgagttgatcgggcggcaaaacgatctcgtcaaggccattctcgagaccgggaaaccgaccatagttctgcttatcaacagcggtccgctttcgatcaactacatcgccgaaaacgttcctgcgattctcgaaggtttctatctagggcaggaaacaggcgtcggcgtcgccgatgtcctgttcggcgacttcaacccggcgggcaaactgacgatcagttttccacgatcagtcggacagttgccgctctactacaaccgcaagccaaccgcgcgccgcggctatctgtttgcaaacaaggagccgttgtttccattcggatttgggcttagctacacgacgttcgcctattccgatctaaaagttactccggcgaagataggcgtcgcgggtgaggcgcgggtcagcgtcacggtcaggaacagcgggagccgtgcgggcgacgaggtcgtgcaactctacattcgcgaccttgtgagttcggttacacggcccatcatggagttgaaagacttcaagcgcatcccgctggcgccgggcgagagtaagaccgtcgagtttgtcatcacgcccgaaaaactttctcttctggatctgaatatgaaaagcgtggtcgagcctggatggttcgatatcatggtcggaacaagctcagtaaaatatgagacagtcaaacttgaggttgcggcgaagtag

SEQ ID NO: 626 - protein, 785 aa, Unknown
  Obtained from environmental sample
  SIGNAL (1)...(25)
  DOMAIN (123)...(354): Glycosyl hydrolase family 3 N terminal domain
  DOMAIN (424)...(668): Glycosyl hydrolase family 3 C terminal domain
  SITE (261)...(264): N-glycosylation site. Prosite id = PS00001
  SITE (414)...(417): N-glycosylation site. Prosite id = PS00001
MKKRAFSFSLCVAIISTFWLPVAHMSSQDNQPDYKNPRLPVDRRVADLLSRMTLEEKVAQLVCLWGSRPQVNPQTNFATDRGDFSPAKAAEVMKHGIGQIARQRERKDPRQGATFANAVQKWLIENTRLGIPAILHDEILHGHMAKGSTSFPQPIALATTWDPDFITKVFTAGALETRARGSHQVLGPNLDLARDARWGRTEETYGEDPYLTSRMAVAIVRALQGPGPGVDGDHVIATAKHFAAHGQPESGTNIAPVNFSERTLREYFLPSFKAAVTEAGIMSVMPSYNEIDGVPSHANKWLLQDLLREEWGFDGHVVSDYYAIPQMMDLHRIAGDKAATAKLAIEAGVDTELPDPDSFPTLLRLVKEGQVSEATLNRAVARNLRAKFLLGLFENPYVDVERAVRITNSSEHRALAAEAARRSITLLKNQNNLLPLNRNTLKSIAVIGPNAAQVHLGGYSDQPGRGVSVVQGIKDKVGGSIKVAYAEGCKITKEGGDWFADTATLSDPAEDRKLIAEAVQVAKTADVALLVLGGNEDTNKEGWADNHLGDRDSLELIGRQNDLVKAILETGKPTIVLLINSGPLSINYIAENVPAILEGFYLGQETGVGVADVLFGDFNPAGKLTISFPRSVGQLPLYYNRKPTARRGYLFANKEPLFPFGFGLSYTTFAYSDLKVTPAKIGVAGEARVSVTVRNSGSRAGDEVVQLYIRDLVSSVTRPIMELKDFKRIPLAPGESKTVEFVITPEKLSLLDLNMKSVVEPGWFDIMVGTSSVKYETVKLEVAAK

SEQ ID NO: 627 - DNA, 1002 bp, Cochliobolus heterostrophus ATCC 48331
ggccctgttcgtcctggccccagtgatagcctttacaaggccatggagaaggccggaagggacttcattggcactgccctgaccctcaggaactctacccgcgaggacgagattatggatgccgacttcaactccttcacgcctgagaacagcatgaagtgggagtcgaccgagccatctcgtaacaacttcacctttgcggatgccgaccgctatgccgcatacgccaagaagaacgagttcgaggtccactgccacacgcttgtctggcactcccagctccctgcctgggtctccaacggcggtttcgacaacaagacgctgattgacatcatggagaaccacatcaagaccgtcatgacgcgctacaagagcgtctgcacccgctgggacgttgtcaacgaggccctcaacgaagacggcacctaccgcgagtccgtgtggtacaacaccatcggcgaggccttcctgcccattgccttccgcttcgccaaccagtaccgcggcaaggcccaactctactacaacgactacaacctcgagtacaacggcaacaagacccagggtgctgcccgtatcgtcaagctcatcaagtcctacggcatccgcattgatggcgtcggctaccaggcccatctcgccagcgagcccacccccaccgcccccggcgctgcccccgaccaggccactctcgaggctgccctccgcgccaccgccaacctcggcgtcaaggtcgcctacaccgagatcgatctccgcatgaacacccctgccacccccgagaagctccaggtccaggccgatgctttcgagcgcgttgccaggtcctgccttgctgtcaagcagtgcactggtatgactgtctggggtatttctgacctgtactcgtggatccctggcgttttcgctggtgagggcgctgccctgctctgggatgagtcctacaacaagaagcctgcctatgctggtttcttgaagggaatcaaggccaagaagcactag

SEQ ID NO: 628 - protein, 333 aa, Cochliobolus heterostrophus ATCC 48331
  DOMAIN (13)...(328): Glycosyl hydrolase family 10
  SITE (31)...(34): N-glycosylation site. Prosite id = PS00001
  SITE (63)...(66): N-glycosylation site. Prosite id = PS00001
  SITE (106)...(109): N-glycosylation site. Prosite id = PS00001
  SITE (187)...(190): N-glycosylation site. Prosite id = PS00001
GPVRPGPSDSLYKAMEKAGRDFIGTALTLRNSTREDEIMDADFNSFTPENSMKWESTEPSRNNFTFADADRYAAYAKKNEFEVHCHTLVWHSQLPAWVSNGGFDNKTLIDIMENHIKTVMTRYKSVCTRWDVVNEALNEDGTYRESVWYNTIGEAFLPIAFRFANQYRGKAQLYYNDYNLEYNGNKTQGAARIVKLIKSYGIRIDGVGYQAHLASEPTPTAPGAAPDQATLEAALRATANLGVKVAYTEIDLRMNTPATPEKLQVQADAFERVARSCLAVKQCTGMTVWGISDLYSWIPGVFAGEGAALLWDESYNKKPAYAGFLKGIKAKKH

SEQ ID NO: 629 - DNA, 1524 bp, Cochliobolus heterostrophus ATCC 48331
ttgcccccttatgcccagtgcggcggcgtcacctacaaaggtgacagtgcctgcgcttctggctggcactgcgtcaagtacaacgactggtacagccagtgtgtccctggcggagaagcttctcctccacctgccaacagtccttctgctgctcccagcttgcccagcaaagccccggctatggagcctaacagtaccgtacctgtggctacccctgcttcctcgcctgtcgacgacgagtcctgcgatgctgatgaggagggtggtgatgctaacacggatgcaaatgaaggggatgacgagtcctgcgacgccgatgaggagggtggcgatgctggcacccagggaagtgagggtgatgatgagtcttgtgaggctgatgacgaacccgttccatcgccatctccagctgctagctccggtggcaacactggtgttacgcccgctgcttctccttctccttccccagctgcctccccttcttcgactgctacctccgcaagcctgtctagtgttgaacctactacttctccttccccctctccagctgctggctctggcggaaacagtcccgctcccaatgttgccggcagcggccgcaatggcgccaaatgcgatcttgatgctgccttcaaggccaagggcaagaaatacgttggtgttgccactgatcaataccgtctcagcactggcaagaacaaggagatcattgtcgacaactttggctgtgttactcctgagaacagcatgaagtgggatgccactgagcccagcgagggccaattcactctcgatggcgctaatgctctcgtttctttcgccaccagtaacggcaaactcatccgcggtcacactaccgtatggcactctcagttggctgcatgggtttctcagatccgtgacaaggccaagctcgaagaggtcatggttaaccacataaagaagctcgttggtacctatgctggcaagatctacgcctgggatgttgtgaacgaaatccttgacgagcaaggtggcttccgatccagtgtcttctacaacgtccttggtgaaggcttcgtctccaccgctttccacgctgcccgtcaggccgatcccctcgctaagctctacatcaacgactacaaccttgacggcgcaaactacgccaagacaaagggcatgattagccatgtagagaagtggattgccgacggtgttcccattgacggaatcggctcccaatcccacatcagctcccccggcactcttttccccatctctggtgtccctgctgctttgaaagctctctgcggtgccgcccccgagtgtgccataactgagttggatatcaactacggtaagcccgccgattgggtcaccgtcttcgatggttgtctcgatatcaaaaactgtgtcggtatcactgtttggggtgtttctgacaaagactcttggatcggtgctgccggtggacctctcctgttcgacagctccttccaggctaaaccctcttacaatgagctttgctctgctcttgcttga

SEQ ID NO: 630 - protein, 507 aa, Cochliobolus heterostrophus ATCC 48331
  DOMAIN (3)...(31): Fungal cellulose binding domain
  DOMAIN (206)...(506): Glycosyl hydrolase family 10
  SITE (7)...(34): Cellulose-binding domain, fungal type. Prosite id = PS00562
MPPYAQCGGVTYKGDSACASGWHCVKYNDWYSQCVPGGEASPPPANSPSAAPSLPSKAPAMEPNSTVPVATPASSPVDDESCDADEEGGDANTDANEGDDESCDADEEGGDAGTQGSEGDDESCEADDEPVPSPSPAASSGGNTGVTPAASPSPSPAASPSSTATSASLSSVEPTTSPSPSPAAGSGGNSPAPNVAGSGRNGAKCDLDAAFKAKGKKYVGVATDQYRLSTGKNKEIIVDNFGCVTPENSMKWDATEPSEGQFTLDGANALVSFATSNGKLIRGHTTVWHSQLAAWVSQIRDKAKLEEVMVNHIKKLVGTYAGKIYAWDVVNEILDEQGGFRSSVFYNVLGEGFVSTAFHAARQADPLAKLYINDYNLDGANYAKTKGMISHVEKWIADGVPIDGIGSQSHISSPGTLFPISGVPAALKALCGAAPECAITELDINYGKPADWVTVFDGCLDIKNCVGITVWGVSDKDSWIGAAGGPLLFDSSFQAKPSYNELCSALA

SEQ ID NO: 631 - DNA, 2232 bp, Cochliobolus heterostrophus ATCC 48331
gcaatcggtcctgattgtaccaatggtcccctgagtaccaatgcaatttgcgatgtcaatgcgcctcctcatgagagggcagcggctctagtcgcagctatggaaccgcaagaaaagctagataacctcgtcagtaaatccaaaggtgtgtcgagattaggtcttccagcgtataactggtggggcgaagctctacacggtgtagctggagcgccaggaatcaaattcgtcgaaccttataaaaacgctacttcgtttcctatgccaatccttatgtcggcagcttttgatgatgatctcattttcaaaattgccaatattatcgggaacgaggcccgagccttcggaaatggtggagtcgctcctatggactattggacccctgacatcaatcccgtccgcgatatacgatggggccgagccagtgaatcacccggagaggacattcgacgaataaaagggtacaccaaggctctgcttgctggcctcgaaggtgaccaagcccaaaggaagatcattgcaacatgcaaacactatgtgggttacgacatggaagcttggggaggatacgatcgacacaacttcagtgcaaagatcaccatgcaagacctcgcagagtactacatgccgccattccagcaatgtgcgcgtgactcgaaggtcgggtcattcatgtgcagctacaatgcagtcaacggtgttccaacatgcgctgacacctacgttcttcaaacaatcctgagggaccactggaactggacagatagcaataactacattactagcgattgcgaagccgttgcggatatctctgagaaccacaaatatgtcgaaacccttgcgcaaggcaccgcacttgcttttgccaagggtatggatcttagctgtgaatacagtggatcgtcagatatcccaggagcttggtcacaaggtcttctgaatctttctgttatcgacaaagcattgactcgacaatatgaaggcttagtccatgccggctactttgatggcgcgaaggcgacttacgcaaacttgagttataatgacatcaacacacccgaagcacgacagctatccttgcaagttacctctgaaggtttggtcatgctaaagaacgatcacacacttccattgcctctcacgaagggatcaaaggtggctatgataggtttctgggccaacgactcttccaaactccagggcatctacagcggtccacctccttaccggcactctccagtattcgctggtgaacaaatgggattagatatggccatagcctggggcccaatgattcagaactcaagtgtgcccgacaactggactaccaacgcgctcgacgcggccgagaagtccgactatattctctactttggtggtcaagactggacagtggcgcaagaaggctacgatcgcactacaatcagttttcctcaagtgcaaatcgaccttcttgccaaactggctaaacttggcaagccgcttgttgtcatcacgcttggtgatatgactgatcactcccctctcttgtccatggaaggcatcaactcaattatctgggcgaattggcctggccaagatggcggtccagcgatactaaacgtgatttccggtgtgcatgctcctgcaggtcgtttgccaataacggaatacccggcagattatgtcaagctctctatgcttgacatgaacttgcgaccacatgccgagagccctggccgtacttatcgctggttcaatgagtctgttcagccatttggcttcggtctacattacactacttttgaggctggttttgctagcgaagaaggtctaacctacgatatccaggaaaccttggatagctgtacacagcagtacaaggatttgtgtgaggttgcaccactggaggtcaccgtggcaaacaagggtaaccgaacatcggatttcgtcgctctcgctttcatcaagggcgaggttggacctaagccatacccactaaagactctgattacgtacgggaggctcagagatatccatgggggcgcgaagaagtcggcgtcacttccgcttacacttggagaattggccagagtggatcaatcaggcaacaccgttatctatcccggcgaatacaccctgctccttgacgagcctactcaggctgagctgaaattgactattacgggcgaggagacaattctggacaaatggccccagccgccaaacggaggcaatcggaccgtgctttga

SEQ ID NO: 632 - protein, 743 aa, Cochliobolus heterostrophus ATCC 48331
  DOMAIN (47)...(297): Glycosyl hydrolase family 3 N terminal domain
  DOMAIN (367)...(594): Glycosyl hydrolase family 3 C terminal domain
  SITE (83)...(86): N-glycosylation site. Prosite id = PS00001
  SITE (255)...(258): N-glycosylation site. Prosite id = PS00001
  SITE (318)...(321): N-glycosylation site. Prosite id = PS00001
  SITE (349)...(352): N-glycosylation site. Prosite id = PS00001
  SITE (400)...(403): N-glycosylation site. Prosite id = PS00001
  SITE (440)...(443): N-glycosylation site. Prosite id = PS00001
  SITE (446)...(449): N-glycosylation site. Prosite id = PS00001
  SITE (588)...(591): N-glycosylation site. Prosite id = PS00001
  SITE (647)...(650): N-glycosylation site. Prosite id = PS00001
  SITE (750)...(753): N-glycosylation site. Prosite id = PS00001
AIGPDCTNGPLSTNAICDVNAPPHERAAALVAAMEPQEKLDNLVSKSKGVSRLGLPAYNWWGEALHGVAGAPGIKFVEPYKNATSFPMPILMSAAFDDDLIFKIANIIGNEARAFGNGGVAPMDYWTPDINPVRDIRWGRASESPGEDIRRIKGYTKALLAGLEGDQAQRKIIATCKHYVGYDMEAWGGYDRHNFSAKITMQDLAEYYMPPFQQCARDSKVGSFMCSYNAVNGVPTCADTYVLQTILRDHWNWTDSNNYITSDCEAVADISENHKYVETLAQGTALAFAKGMDLSCEYSGSSDIPGAWSQGLLNLSVIDKALTRQYEGLVHAGYFDGAKATYANLSYNDINTPEARQLSLQVTSEGLVMLKNDHTLPLPLTKGSKVAMIGFWANDSSKLQGIYSGPPPYRHSPVFAGEQMGLDMAIAWGPMIQNSSVPDNWTTNALDAAEKSDYILYFGGQDWTVAQEGYDRTTISFPQVQIDLLAKLAKLGKPLVVITLGDMTDHSPLLSMEGINSIIWANWPGQDGGPAILNVISGVHAPAGRLPITEYPADYVKLSMLDMNLRPHAESPGRTYRWFNESVQPFGFGLHYTTFEAGFASEEGLTYDIQETLDSCTQQYKDLCEVAPLEVTVANKGNRTSDFVALAFIKGEVGPKPYPLKTLITYGRLRDIHGGAKKSASLPLTLGELARVDQSGNTVIYPGEYTLLLDEPTQAELKLTITGEETILDKWPQPPNGGNRTVL

SEQ ID NO: 633 - DNA, 2160 bp, Cochliobolus heterostrophus ATCC 48331; identical to SEQ ID NO: 557

SEQ ID NO: 634 - protein, 719 aa, Cochliobolus heterostrophus ATCC 48331; identical to SEQ ID NO: 558
  DOMAIN (52)...(262): Glycosyl hydrolase family 3 N terminal domain
  DOMAIN (342)...(589): Glycosyl hydrolase family 3 C terminal domain
  SITE (217)...(220): N-glycosylation site. Prosite id = PS00001
  SITE (598)...(601): N-glycosylation site. Prosite id = PS00001

SEQ ID NO: 635 - DNA, 981 bp, Cochliobolus heterostrophus ATCC 48331
tctgttcaaccctacgatcccccggttatcaacaccttccaccagtgcgaccctgcagcccacgtctggaagcatgatcccaacactgtatacatctatggatcccacgactggaactcaaccaggcagcccccggtgcaatacgacatgaaggattactacgtgcttactcagaccgattacaccaagcctgccacagtcggaccaaagcttttggaccttgtggacattccatgggcgtcgcagcagctctgggctcctgatgcgaccgagaaggacggctactactacctgtttttcccagccaaggacaaggacgatgtcttccgcatcggagtggccaaatctgacaagcccgacggaaaattcaagcccgaacccaacccgattcccggcacttacagcattgaccccacaatcttggatgacaatggcgactactacatggtatttggcggactgtggggtggtcagcttcaagcatggaccaacaacgtcttgaacacgtcccaattcggtaacatttctccttcttccggcccagccatcggaccccgtttcgctaagctctcggccaacctcacctctctcgccaccacaccaaaggaactcgtcatctacgacgaagacggcaatgtcatgcaggcaaacagcacgcgccgtttctttgaggccccatctctgaacaaggtcggcaacctttatgtcctccagtactccaccggcacctcgcacactattgaaatcgccaccgctaccaagcctgatggcccttactactggaagaacacgcttctgcagcctgtaaagggatggactacccacgagtcgattgtcaagttcaagaacgactggcttctgtactatgctgattcttcgctttctggccgtgatgatctccgcaacaccaaggtcaggcaggtcttgtttgagaatggcacctttacgcttgctcagcctcagcctgtcgtcaccccttaa

SEQ ID NO: 636 - protein, 326 aa, Cochliobolus heterostrophus ATCC 48331
  DOMAIN (15)...(315): Glycosyl hydrolases family 43
  SITE (39)...(42): N-glycosylation site. Prosite id = PS00001
  SITE (170)...(173): N-glycosylation site. Prosite id = PS00001
  SITE (195)...(198): N-glycosylation site. Prosite id = PS00001
  SITE (220)...(223): N-glycosylation site. Prosite id = PS00001
  SITE (316)...(319): N-glycosylation site. Prosite id = PS00001
SVQPYDPPVINTFHQCDPAAHVWKHDPNTVYIYGSHDWNSTRQPPVQYDMKDYYVLTQTDYTKPATVGPKLLDLVDIPWASQQLWAPDATEKDGYYYLFFPAKDKDDVFRIGVAKSDKPDGKFKPEPNPIPGTYSIDPTILDDNGDYYMVFGGLWGGQLQAWTNNVLNTSQFGNISPSSGPAIGPRFAKLSANLTSLATTPKELVIYDEDGNVMQANSTRRFFEAPSLNKVGNLYVLQYSTGTSHTIEIATATKPDGPYYWKNTLLQPVKGWTTHESIVKFKNDWLLYYADSSLSGRDDLRNTKVRQVLFENGTFTLAQPQPVVTP

SEQ ID NO: 637 - DNA, 1734 bp, Cochliobolus heterostrophus ATCC 48331
aaggtcacacgttcgagtgcagcgatgctgctgcttaatggcgctgtttctgttgcccaatcaataaacgatacttccggtgtcacgtgtccttccacctccaagttcacgccgctctccgccggaacatttttcgcaaaactgaacccaggctggaatgtcggcaatactttggatgctgtggaaacagaaggtgactggaataacaaacccgttgtagctagcactttcgacgatgtgaagaaggctggctttaaaagtgtgagaattccggtcacgtgggcctaccatttcacatcgcaagctccggactggacagtcgacccagtatggcttcaaagagtctcggatgtcattgatatggtgacttcacgcggcctttatgccatagtaaatgtccaccacgactcctggacttgggcagacttgacctcagcgagcactaatgtgacagccttagaggaacgcttcagtaaactctggctgcagattgggaccaagcttgcctgcaagagcgaaatgttggccttcgaaccaattaatgagatcccggggactacacctgaacatggagctattgtcaatcgcctcaatgatatcttcttgcagaagatcaacgaggcgggggggcataattcgaagagagtggttacgttggttggagcgggtgaggatggagtaaagacgagtctttggtttaagaaaccggatctcaagttcaagaatccctggggcattcagttccattactacagcccctacgattacgtcttccaggcatggggaaagacgacatggggctccgaagccgacaaggcctctctggaaggtgatctcgctgcggtacggtcaaacttcaccgatgtcccaatcgtcatcggggagtgggccgtatcacctgtagctacagagacagcagcaagatggcgttactttgattttttcgtgcgcaccgccgcaaagtacaatatgtcgaccattctgtgggacaatggcgccgattttctcaatcgcgcaacgcacctctggagggatgaagtggcgatggatatctaccgcaatgcgataaaaggtatcccaaatgctttgccagacagtactacagacggagctgtcactacacagcaaagctctgcgtacatctaccacgcgaagaacgagacgaccaaggacgttacactaagcttcaatttcaacggtaacacactgagcaagatcagcaatggcagcagacaacttgccaaaggaaaggactacaccctctcaggccaggacatcaccttcaaagccggctatctcagcaccatcattacgccttcttctccaacgggcagtctaacaaacctcactctgacgttcaaccgtggtgccgctttacaagtaaacgtactccagtactctacccctgtgctatcgagcacctccggtcccctgccagccgcaggccaagacttacgcatccccgtttcatgggctggcatcaacaggccggcagctgtcaaggcgcaaaagtcagatggcacatacctcgtcgatgactggacccagtacctcggtcctcttcagcaaggccgtatgacctatggcaatcagtgggattgggatgctaacaatgtgattatcaaagcagcggctgttgatgcggtgagggctgccaacaaagatacaacactaacaattgagttctatcctaggcaacctgggaacgacgctgtttatacactcaaggtgtaa

SEQ ID NO: 638 - protein, 577 aa, Cochliobolus heterostrophus ATCC 48331
  SIGNAL (1)...(19)
  DOMAIN (56)...(339): Cellulase (glycosyl hydrolase family 5)
  DOMAIN (365)...(463): Domain of unknown function
  SITE (23)...(26): N-glycosylation site. Prosite id = PS00001
  SITE (151)...(154): N-glycosylation site. Prosite id = PS00001
  SITE (289)...(292): N-glycosylation site. Prosite id = PS00001
  SITE (327)...(330): N-glycosylation site. Prosite id = PS00001
  SITE (391)...(394): N-glycosylation site. Prosite id = PS00001
  SITE (414)...(417): N-glycosylation site. Prosite id = PS00001
  SITE (454)...(457): N-glycosylation site. Prosite id = PS00001
KVTRSSAAMLLLNGAVSVAQSINDTSGVTCPSTSKFTPLSAGTFFAKLNPGWNVGNTLDAVETEGDWNNKPVVASTFDDVKKAGFKSVRIPVTWAYHFTSQAPDWTVDPVWLQRVSDVIDMVTSRGLYAIVNVHHDSWTWADLTSASTNVTALEERFSKLWLQIGTKLACKSEMLAFEPINEIPGTTPEHGAIVNRLNDIFLQKINEAGGHNSKRVVTLVGAGEDGVKTSLWFKKPDLKFKNPWGIQFHYYSPYDYVFQAWGKTTWGSEADKASLEGDLAAVRSNFTDVPIVIGEWAVSPVATETAARWRYFDFFVRTAAKYNMSTILWDNGADFLNRATHLWRDEVAMDIYRNAIKGIPNALPDSTTDGAVTTQQSSAYIYHAKNETTKDVTLSFNFNGNTLSKISNGSRQLAKGKDYTLSGQDITFKAGYLSTIITPSSPTGSLTNLTLTFNRGAALQVNVLQYSTPVLSSTSGPLPAAGQDLRIPVSWAGINRPAAVKAQKSDGTYLVDDWTQYLGPLQQGRMTYGNQWDWDANNVIIKAAAVDAVRAANKDTTLTIEFYPRQPGNDAVYTLKV

SEQ ID NO: 639 - DNA, 1581 bp, Unknown
  Obtained from environmental sample
atgaacgctgcgcaactgctttccgcgataacgggttccgtcacggtgttggctttactcgcacaggcacccgcgcgagcgcaggtgcaaacgcctgcgccaacgcagcaggcaacctgcagcgcgctcgccgagtgggccggcggtccgggcgacttgcgaattgtcgaagcgcgcttctataccgaacgcagtgtcggcggtcccggcggcggccagacgctaccgccgcattgccacgtcaccggcagcttcgagcatcgcaccggcatcggtgacgtcgagtatgcgatcggtttcgcaatcaacctgcccgaagactggaacggccgctttctgtttcagggcggcggagggctgaatggcgtggtcagagaaccggtcggcgccggggctagcggcggccgctccgcgctcgcgcgcgggttcgcagtcgtcagcacggacagcgggcacaccggttccggcttcgacagcagcttcatggccgaccaactcgcgctgctgaacttccagtttctggcaaacgcgaagaccaccgaggtggcgcgcccgatcgtcgaggcctattacggctcggcgcctcatcacagctatttcgtcggctgctccaccggcgggcgcgaaggcatgatcatggcgcagcgctatcctcaccttttcgacggcatcgtctccggtgcgccggcgatgcgaacgacgatcagcaatctggcattgcgctggatcagcaaccagtacgtcagggccggcgtatcaaatccgcgcgagccgttcgccgccgaagagcgggccctgatcatgggcgcgctgatggattcatgtgatgcactggacggccttgaggatagcctgatcttcaatcgcacgtcctgcgacttcgacccgcgcgcgctcgcgtgctccgcgaatcccggcagaacccccgggcaacagtgcctggtcgatgccaaggccgaagctctggcgcgcgccatggcaggcccggtcaatgcagccggcatgccggtctacgtctcgtttccttacgactcgggcatcgacgataccgggggtctgccggggctcctgatcgcgggcggcagcccgccggtcggcgggagcggcgcagacatgtccagccaggacgtcgacgcggaattcatggctgcactcgtggcaaatgaggcgctcggcgccaccgcctggcagttcaacgtgagcacgttcattgaggcagggggcaagcagatgttctatcacggcgaggccgacccgtggttttccgcgaacgacaccgtgcgttacttcgatgcaatgagtgccgccaacaatgacgtcgcagccgttgatcaatacagtcgcctgtacctcgtgcccggcatggcccactgcgccggaggcgagcagaccgtcgactcattcgatctgctgacaccgatcgtcgagtgggtcgagaacggcaacgccccgggtgccgtgacagccaccggcgcctcgatgcccggccaaagccggccactgtgcccgtacccgagctacgcgcacttcgagggcggcgaggcagcgaacgtcggcgattacgcgtgccgcatgccgtag

SEQ ID NO: 640 - protein, 526 aa, Unknown
  Obtained from environmental sample
  SIGNAL (1)...(27)
  DOMAIN (79)...(525): Tannase and feruloyl esterase
  SITE (292)...(295): N-glycosylation site. Prosite id = PS00001
  SITE (405)...(408): N-glycosylation site. Prosite id = PS00001
  SITE (430)...(433): N-glycosylation site. Prosite id = PS00001
MNAAQLLSAITGSVTVLALLAQAPARAQVQTPAPTQQATCSALAEWAGGPGDLRIVEARFYTERSVGGPGGGQTLPPHCHVTGSFEHRTGIGDVEYAIGFAINLPEDWNGRFLFQGGGGLNGVVREPVGAGASGGRSALARGFAVVSTDSGHTGSGFDSSFMADQLALLNFQFLANAKTTEVARPIVEAYYGSAPHHSYFVGCSTGGREGMIMAQRYPHLFDGIVSGAPAMRTTISNLALRWISNQYVRAGVSNPREPFAAEERALIMGALMDSCDALDGLEDSLIFNRTSCDFDPRALACSANPGRTPGQQCLVDAKAEALARAMAGPVNAAGMPVYVSFPYDSGIDDTGGLPGLLIAGGSPPVGGSGADMSSQDVDAEFMAALVANEALGATAWQFNVSTFIEAGGKQMFYHGEADPWFSANDTVRYFDAMSAANNDVAAVDQYSRLYLVPGMAHCAGGEQTVDSFDLLTPIVEWVENGNAPGAVTATGASMPGQSRPLCPYPSYAHFEGGEAANVGDYACRMP

SEQ ID NO: 641 - DNA, 2040 bp, Unknown
  Obtained from environmental sample
atgcccaaaacctcgactaccgatccctggcgtgcgatccgcacccgggcgcagcgcacggtgcgcctgcttgcaggcggctccctgctatcactggctctcaccggcgcgcccgcactggccgcctacaccgggaacgcggctccctgcaataacggcaacccgcaagccggctcctggcaaggcgaggccacttacctgagcggtacctcgcgctatgactccggtgaatggatctataccgactatgtgttcgacgacggcgaactgctgaacaacgtcgccgacatcgtcgaattccgcgtctgccgggcggggaacgatctcaaggcgcgcgtcaccctcaactcgctgatggaaccggcgccggtggcgctggccgtggcagtggaatcggccaacggccgaagccggccctggccgcacaacgccggccttgaatcgaactggaaccagttcttcctggtaaccctggacgcagtcagcctcacccaagccaacggccgcacccagcagctgggtgcgcccgaggtggactacgagaacggcaccgtcagcttccgcctgccggccaccgcccgtggggcggccccggtgcggctggtggtcgccagcggcgagtggaccggcgaaggcttcggccagatggtcgacctggcgttcaacagccgtgaccgcgaagtgatgggcaccaacttccggtccatcgcccaaaatgccgccatcgccgacggcgacgtctccggcttctatgccgaggtggatctgctgaagctgcgccgccgggtaaccgacccgcaaatcaccgacagcggcttttacaaccgcatttaccgcagcgtgcaggacgtcgaaggcggctacgcctccagcttcccgaaataccaaggccgctggcagccctatggcctgtggattccaaaaggctacgacccggccgagccggctcccatgctgctgacgctgcacgccctgggatccacccacaacatgttcggcaccttcggcactttcccgaccatggccgatggcctgggcgcgattgccatcaccccgctggccatgggcaccgacggctggtactgggacgaagcgctggtggacaccttggacgcctgggccgacgccgaccgcgcctacaacattgatcgcgagcgggtgtactcctccggctactccatgggcggctacgcgacctatcgcctgaccacgctgttcccggacctgttcgccggggcggtgacctgggtcggcccgccggcgcaccagtactggctgccgccgttctcgccgtcaccggcgggtccgcgtcagcaggctggcaacaccagcacgatgatcgagaacgtcgcccatgtgccgttctacatcatcgccggcacgaccgacctgttggtcccggtcggcagcatcaacgcgcaggccaaccgtttcgcggcgctgggccatacctaccgctatgcgcttcacagcggcatgggccacttcgactacatcggctataacgactggacgcgcgagcgtgattggcttcagggccgtacccgcgtagtcaacccggcccaggtgtcgctgcgcattcggcccaacgcgctggccacctccaatctgccggagccgcgccggcaggcactgctcgatcacctcgccacgctaagcgcgcagctgggcggcgcggtggacggcgcttactggctgtcggggatcgccacctcggtgaccggcaaccagatcgcccaggtcgaactggtatccgccggtatcgccgagcgcaccccggtggttgagtcgttccagcgggcggaagccggtccgccgacgccgttcagcttgcgcggcgccgaccgcacctgggccgccgaaccggtagcgaacgcgctttccggccgactcgccggcgtcaccgagcttacggttgacctggcgcgggccgggctgttccgcaccggcctggacctgcagattacggttgatcagccggtcgcactgcaccttaaggaacgcgacggcagcatcgaaaccgtgcaactggcgccgtaa

SEQ ID NO: 642 - protein, 679 aa, Unknown
  Obtained from environmental sample
  SIGNAL (1)...(41)
  SITE (184)...(187): N-glycosylation site. Prosite id = PS00001
  SITE (448)...(451): N-glycosylation site. Prosite id = PS00001
MPKTSTTDPWRAIRTRAQRTVRLLAGGSLLSLALTGAPALAAYTGNAAPCNNGNPQAGSWQGEATYLSGTSRYDSGEWIYTDYVFDDGELLNNVADIVEFRVCRAGNDLKARVTLNSLMEPAPVALAVAVESANGRSRPWPHNAGLESNWNQFFLVTLDAVSLTQANGRTQQLGAPEVDYENGTVSFRLPATARGAAPVRLVVASGEWTGEGFGQMVDLAFNSRDREVMGTNFRSIAQNAAIADGDVSGFYAEVDLLKLRRRVTDPQITDSGFYNRIYRSVQDVEGGYASSFPKYQGRWQPYGLWIPKGYDPAEPAPMLLTLHALGSTHNMFGTFGTFPTMADGLGAIAITPLAMGTDGWYWDEALVDTLDAWADADRAYNIDRERVYSSGYSMGGYATYRLTTLFPDLFAGAVTWVGPPAHQYWLPPFSPSPAGPRQQAGNTSTMIENVAHVPFYIIAGTTDLLVPVGSINAQANRFAALGHTYRYALHSGMGHFDYIGYNDWTRERDWLQGRTRVVNPAQVSLRIRPNALATSNLPEPRRQALLDHLATLSAQLGGAVDGAYWLSGIATSVTGNQIAQVELVSAGIAERTPVVESFQRAEAGPPTPFSLRGADRTWAAEPVANALSGRLAGVTELTVDLARAGLFRTGLDLQITVDQPVALHLKERDGSIETVQLAP

SEQ ID NO: 643 - DNA, 1623 bp, Unknown
  Obtained from environmental sample
atgcataagttcatatccatgggcgcgttttcagtagtagccattgcttgtagcagtttactcatgggatgccaaaacgaaatatccaatcagaagtccgcacaagttgatccgacaatggtaaaaacctccagtggccaggttaaaggttcgattgacggggaaatattatcgtttaaaggtataccatatgcgtttccgccggtgggggatctgcgctgggaggcgcctcaggcaatcacttggcaaggtgttcgctcagcgactgaatacggtaacgactgcatgcaagagccttttcccagtgacgcagcgcctcttggaactgagcctgcggaagattgcctggtcctgaatgtttggaaaaaggccaataataatgataaaccattgccggtggtggtgtggatctacggtggcggttttgttaacggaggttcttctcctgcggtatatgacggcagtgcgtttgccagtaaagatgtgatttttgtcagtttcaactaccgcctggggcgattcggtttcttcgcccatccagcgctgaccgctaaaaaagatggcctgttaggtaactacggttacatggatcaaatcgcagccatgaagtggattaatgacaatattgcagcttttggtggtgatcccaatgccattaccattatgggggaatcggcgggtggcttctcggtgattaacttgatgctcgcggagcaagctcgcggtctgttccagcgcgccattattatgtcgggtggcggccgaacccgagctaacgcagaccgcggtattgatactgcgccagaaggacaattgactgctgagcaagttggtattaattttgccaaggctaacggtattgaaggcacaggtcctgacgcattggctgcacttcgtgctttaagcgcagagcaagtgaccgatggtctcaatatggcttacttgtttatgcctaaggaaggtccagaaacctatgttggtggccctatcaaagacggcgaaatgatcaccgaagatataggtgttcgcatcgctaaaggcgatgctgtcaaggtccctgtattgatcggcactaccagtgcggatatcggtttcgccagtggcaataccaaagatgagttgtttgccagcttcggcgattatgccaacgaagcgcgccaggcatacgatcccaacggcgacctgtcactacaggagttgaagatgctggttggtagtgaccgctttatgaatgagccagcgcatttcgtatctcgcgagttaagccgtctgggccagccagtgtggctgtaccgtttttcctacgttgctgagagcatgcgtgacgaatggagtggggctcctcacgcaacagatatcccattttttctcgatactgtgaacgcgaaatacggtgaccagttgaccgcccaagaccgccatgcagcattcctggcgaatgaagctttcgttaattttgttaagaccggcaacccaaatccagcgggtgtagaagactggccgacttaccaaggccctcacggtccaatcatgaatttctctcacaaggccactgcggaggttattcacgatccttggcaggaacgcctttcggtagtgacccgcgctgctgatgaacaataa

SEQ ID NO: 644 - protein, 540 aa, Unknown
  Obtained from environmental sample
  SIGNAL (1)...(23)
  DOMAIN (13)...(529): Carboxylesterase
  DOMAIN (134)...(336): alpha/beta hydrolase fold
  SITE (215)...(230): Carboxylesterases type-B serine active site. Prosite id = PS00122
  SITE (519)...(522): N-glycosylation site. Prosite id = PS00001
MHKFISMGAFSVVAIACSSLLMGCQNEISNQKSAQVDPTMVKTSSGQVKGSIDGEILSFKGIPYAFPPVGDLRWEAPQAITWQGVRSATEYGNDCMQEPFPSDAAPLGTEPAEDCLVLNVWKKANNNDKPLPVVVWIYGGGFVNGGSSPAVYDGSAFASKDVIFVSFNYRLGRFGFFAHPALTAKKDGLLGNYGYMDQIAAMKWINDNIAAFGGDPNAITIMGESAGGFSVINLMLAEQARGLFQRAIIMSGGGRTRANADRGIDTAPEGQLTAEQVGINFAKANGIEGTGPDALAALRALSAEQVTDGLNMAYLFMPKEGPETYVGGPIKDGEMITEDIGVRIAKGDAVKVPVLIGTTSADIGFASGNTKDELFASFGDYANEARQAYDPNGDLSLQELKMLVGSDRFMNEPAHFVSRELSRLGQPVWLYRFSYVAESMRDEWSGAPHATDIPFFLDTVNAKYGDQLTAQDRHAAFLANEAFVNFVKTGNPNPAGVEDWPTYQGPHGPIMNFSHKATAEVIHDPWQERLSVVTRAADEQ

SEQ ID NO: 645 - DNA, 1362 bp, Unknown
  Obtained from environmental sample
atggcaaataaaattctcttccccgagaactttctctggggcacggcgaccgcatcctaccagatcgagggggcttgggataaacatggtaagggcgagtcgacctgggaccgttttacgcatacacctggaaagatcaaaaacaatgatacgggcgatgtagcagatgaccattatcgattatggaaaaaagatatcggcttgatgaagaagctcggcttgaaggcttatcgtttttcgacttcctggccgcgggtgctgccggccgggcgcggtaagagcaatcaaaaaggactcgatttctacagcaagctggttgatgagttgctaaaagcaaatatcatcccattcgtgacattgaatcactgggacatcccacaaaagttggaggacgagggtggctgggccgtgcgctcaacggctgaggcatttgtggaatatgccgatctcatgtcgcgcacgcttggagaccgcgtcaagaactggatcacgcacaacgaaccggccgtcgtcgcctggatgggatacgggatgggcatccacgcgccgggcttaacggatttctcgattgcggtgccggtctcgcatcatctgctcctttcgcacggatgggccgtgcctgtgattcgcggtaacagcccggatgccgaggtgggcattaccctcaacattcaatggggcgaagcagcatccaacagccgggccgacctaaacgccctgcgcctgaacgatggacagtggttccgctggtttgccgatccggtttatggccgcggctatccttccgacgtggtggctgatttcgagaaaatgggcgcgctgccgaacggcatgaatttcgtgcaacctggcgatatggatgtcatcgccacgccaaccgatttcctcgggctcaattattattcccgccatgtgcatcgcgtcaacacaccggataacgatcaacaggttgtgtttgccaaacagcagggtcccgagaactggaccgagatgggctgggagatccatcctgatggattggccggaattttatccagagcgtatttcaattaccagccgcgcaaagtatatgtgactgaaaacggtgccagctattccaccgcgcccgatgagaatggtattgtcaacgacattcaccgcgtcaattatctacggacgcacttcgcggctgcccatcgcgccctgcaggcgggcgtgccattggcaggatacttcgtctggtcaatgctcgataacttcgaatggagtcacgggtacagccagcgctttggcatcgtttatgtggactatcaaacccagaagcgttacttgaaagacagcgccaagtggtacaaaggtgtcatcaaaaagaatgggttctaa

SEQ ID NO: 646 - protein, 453 aa, Unknown
  Obtained from environmental sample
  DOMAIN (3)...(453): Glycosyl hydrolase family 1
  SITE (11)...(25): Glycosyl hydrolases family 1 N-terminal signature. Prosite id = PS00653
  SITE (49)...(52): N-glycosylation site. Prosite id = PS00001
  SITE (332)...(335): N-glycosylation site. Prosite id = PS00001
  SITE (361)...(369): Glycosyl hydrolases family 1 active site. Prosite id = PS00572
MANKILFPENFLWGTATASYQIEGAWDKHGKGESTWDRFTHTPGKIKNNDTGDVADDHYRLWKKDIGLMKKLGLKAYRFSTSWPRVLPAGRGKSNQKGLDFYSKLVDELLKANIIPFVTLNHWDIPQKLEDEGGWAVRSTAEAFVEYADLMSRTLGDRVKNWITHNEPAVVAWMGYGMGIHAPGLTDFSIAVPVSHHLLLSHGWAVPVIRGNSPDAEVGITLNIQWGEAASNSRADLNALRLNDGQWFRWFADPVYGRGYPSDVVADFEKMGALPNGMNFVQPGDMDVIATPTDFLGLNYYSRHVHRVNTPDNDQQVVFAKQQGPENWTEMGWEIHPDGLAGILSRAYFNYQPRKVYVTENGASYSTAPDENGIVNDIHRVNYLRTHFAAAHRALQAGVPLAGYFVWSMLDNFEWSHGYSQRFGIVYVDYQTQKRYLKDSAKWYKGVIKKNGF

SEQ ID NO: 647 - DNA, 2163 bp, Unknown
  Obtained from environmental sample
atgcgccttttcgcggctttctgcctgctgctcaccgccttgctggccacgccggccgtggcggaggacggctacgacctctggttgcgctaccgccaggtcgaagctcccgccctcgcgcgataccgctcccaggcgagcgcgatcgtgatttcgggcgacacgccgaccctgcgcgcggcgcgggacgagctgcagcgcggcctgggcgggctgctcggccgcccggtgccgatcgaccgcagcgtgacgcgcgacggcgcgatcgtcgtcgtcgtcaacacttcgcctttcctcggcggcctccgccccgagcatcgcccgctcggccgggaaggctatctgatccgctccatggtcctcaacggccgcaacatcaccctgatcctggccgagaacgacaccggcgcgctctacggcagcttccacctgctgcgcctgatccagacccggcaaccgctcaccggcctcgacatcaccgaggtgccgcgcgtcgaattgcgcatgctcaaccattgggacgatctcgatcgccacgcgatgcgcggctatgcgggccagtcgctctgggactggcagaagctgcccggctggcgcgacccgcgctacaccgattatgcgagggccaatgcctcgatcgggatcaacggcaccgtcgtcaccaacgtcaacgccagcgccgacgcgctcagggccgacttcctcgagaaggtccgcgccctcgccgacatcatgcggccctacggcatcaaggtctatctgtcggcccgcttcaacgcgcccatggtgcttggcggcctgccgacggccgacccgctcgacccggcggtgcgccgctggtggcgggagaaagcggacgagatctaccggctgatccccgatttcggcggcttccttgtgaaggcgaactcggagggccagcccggcccgcaggattatcaccgcacccatgccgacggcgccaacatgctcgccgaggcggtcggcccgcatggcggcgtcgtgatctggcgcgccttcgtctatgcgcccggcacgcaggaccgggccgagcaggcctatgacgagttcatgcccctggacggccagttccgcgacaacgtcatcatccaggtcaagaacggcccgatcgacttccagccgcgcgagccgttcagcccgctgttcggcgcgatgcgccgcaccgcggtcggcatggaattccaggtcaccaaggaatatctcggcttcgccactcacctctcctatctcggcacgatgtgggaggaggtgctgcgcgccgacaccttccagcgcggccccggcacaacggtcgcccgcgtcatcgacggctccgcgaccggccagcgccgcacgctcgtcgccggcgtcgccaataccggaaccgaccgcaactggaccggctcgcaattcgaccaggccaactggttcgccctcggccgcctcgcctggaatccggaattgtcggcccgcgccgtcgccgaggaatggacgcggatgacctggagcaacgacccgcgagtcgtcggacccgtggtcgacatgctgatgggctcgcgccaggcgaccgtgaactacatgacgccgcttgggctcgtgcacctgatggcgagcgggctccattatggccccgggccctgggtggacgatctgggccgtccggactggaacccggtctattatcaccgcgccgaccgggacggcatcggcttcgaccgcaccgccaccggcaccaacgccatcgcccaatatgcgccggaagtggcgcgccgcttcggcagcctgcagaccgtgggcgacgacaatctgctcttcttccaccatgtgcgctgggactaccggcttgcctccggacgcacggtctgggaggagctggtgacgcgctattcgcagggggtcgccgaggttcgcgggatgcggcggcaatgggcggccgtggcgccctatgtcgatcccgaccgccatgccgaggtcgccgccttcctcgccatccaggaggaggaagcgcaatggtggcgcgacgccagcgtcgcctatttccagagcatcagccgcctgcccttgcccgccggcgaggcgccgccgccgcacgatctcgcttattaccgcgcgatccgccatccctacgcgccagggcgggacggtccgccggcgccgagatag

SEQ ID NO: 648 - protein, 720 aa, Unknown
  Obtained from environmental sample
  SIGNAL (1)...(21)
  DOMAIN (27)...(144): Glycosyl hydrolase family 67 N-terminus
  DOMAIN (145)...(466): Glycosyl hydrolase family 67 middle domain
  DOMAIN (467)...(697): Glycosyl hydrolase family 67 C-terminus
  SITE (126)...(129): N-glycosylation site. Prosite id = PS00001
  SITE (135)...(138): N-glycosylation site. Prosite id = PS00001
  SITE (213)...(216): N-glycosylation site. Prosite id = PS00001
  SITE (219)...(222): N-glycosylation site. Prosite id = PS00001
  SITE (227)...(230): N-glycosylation site. Prosite id = PS00001
  SITE (472)...(475): N-glycosylation site. Prosite id = PS00001
MRLFAAFCLLLTALLATPAVAEDGYDLWLRYRQVEAPALARYRSQASAIVISGDTPTLRAARDELQRGLGGLLGRPVPIDRSVTRDGAIVVVVNTSPFLGGLRPEHRPLGREGYLIRSMVLNGRNITLILAENDTGALYGSFHLLRLIQTRQPLTGLDITEVPRVELRMLNHWDDLDRHAMRGYAGQSLWDWQKLPGWRDPRYTDYARANASIGINGTVVTNVNASADALRADFLEKVRALADIMRPYGIKVYLSARFNAPMVLGGLPTADPLDPAVRRWWREKADEIYRLIPDFGGFLVKANSEGQPGPQDYHRTHADGANMLAEAVGPHGGVVIWRAFVYAPGTQDRAEQAYDEFMPLDGQFRDNVIIQVKNGPIDFQPREPFSPLFGAMRRTAVGMEFQVTKEYLGFATHLSYLGTMWEEVLRADTFQRGPGTTVARVIDGSATGQRRTLVAGVANTGTDRNWTGSQFDQANWFALGRLAWNPELSARAVAEEWTRMTWSNDPRVVGPVVDMLMGSRQATVNYMTPLGLVHLMASGLHYGPGPWVDDLGRPDWNPVYYHRADRDGIGFDRTATGTNAIAQYAPEVARRFGSLQTVGDDNLLFFHHVRWDYRLASGRTVWEELVTRYSQGVAEVRGMRRQWAAVAPYVDPDRHAEVAAFLAIQEEEAQWWRDASVAYFQSISRLPLPAGEAPPPHDLAYYRAIRHPYAPGRDGPPAPR

SEQ ID NO: 649 - DNA, 759 bp, Cochliobolus heterostrophus ATCC 48331
atgtacgtctacaagcccgaccaggtcaagaccgatgcgctcgttgtagccattcacccctgcggatccaccggcccgagctactttggctgggcaccctggaaaaagggctcggattccaagggctacatctccgtgttcccgagcgcgacggcgtcgtgctgggatgtttcgagcaaggcgtcgttgtcgcataatggaggcggcgagtcgaatgctatcgctgatatgattacgtatgcgaccaagcagtacaacctcaatcccaagaaggtgtatgtggtgggagagtcttccggtgcgatgatgacgaatgtcttggccgcgacataccccgatcttatcgctgcgacttcggtgtactctggtgtcgctgctggatgctttgtgtcggcttctggagcggtggcggcgtggaacagtgaatgcgctcaaggacgttccatcaagactgcgcagcagtggggtgatattgcgcgcgcaatggatcctggctacaatggccagcgtcctcgtgttcaattctggcatggctctgttgatgccaccatcctcccgcccaactacaacgagacactcaagcagtggaccaacgtgtttggagtcagcactacgcctacaaggtcgcaggccaacacgccccagaccaactaccgcaccgacgattttggtcccaacgttcagggaatctgggcagttggtgtcggacacggtgtcccagctcaccaagctcaaactgaggcctggttcggattgtaa

SEQ ID NO: 650 - protein, 252 aa, Cochliobolus heterostrophus ATCC 48331
  SITE (192)...(195): N-glycosylation site. Prosite id = PS00001
MYVYKPDQVKTDALVVAIHPCGSTGPSYFGWAPWKKGSDSKGYISVFPSATASCWDVSSKASLSHNGGGESNAIADMITYATKQYNLNPKKVYVVGESSGAMMTNVLAATYPDLIAATSVYSGVAAGCFVSASGAVAAWNSECAQGRSIKTAQQWGDIARAMDPGYNGQRPRVQFWHGSVDATILPPNYNETLKQWTNVFGVSTTPTRSQANTPQTNYRTDDFGPNVQGIWAVGVGHGVPAHQAQTEAWFGL

SEQ ID NO: 651 - DNA, 2508 bp, Cochliobolus heterostrophus ATCC 48331
atgcggttgttattcacaaccttactttgggccgtcggtggagccctcgccgaagacggctcccagggctggctacgatatgcccggatcccaaatggagcatccgctcaatcggtaccatcaacaatcatcgcactgaatagtacacggatcagtcccgtatatacagctggtcaagaacttcaaagaggtgtactaggcaccaccagtaaacaactcacagtgagcacaaccgccagccaggaccagtcagccatcatcgtcggaactaccgaagcttatagcaaggcatacgggaagattggcgaatctgaagatttggaagatgatggattttacctcagtataagcccaggaaaagtcatcatcatcggccagaacgaacgtggtgctttgtatggtgcattcgaatacctctcacagctcgcacagaacaatattacattcggatccaaagtatacaaccctcaggcaccaattcgatgggttaatgaatgggacaatcttgatggaagtattgagcggggctatgctggcccatcaatcttcttccggaacggttatgtagtcgacaacactactcgcatcgctgagtacgcccgactactcgcgtccattcgcgtaaacggcgccattgtcaacaacgtcaacgcagatcctgctctactcaacgatcgcaacgtagccggtctcggcaggattgcagatgctatgaggccgtatggagtgcagattggcatttcactctattttgcatccccccagcaatccctgggcactttcgacccgctagaccccagggttgatgcctggtgggcgaacatcactaaccagatctattcaaaggtcccagatatggcaggttacttggtaaaagcgaatagcgagggccagccgggaccgctgacatacaaccgcactctggcagatggagcgaacatgtttgcaagggctttgaagcctcatggtggagtagtcatgtttcgtgcttttgtgtacgacaacaacctcaacccggcagattggtacgcggaccgggcaaatgcacaactcgagttcttccagcatctcgacggaaagtttgacgagaacattgtcttgcagatcaaattcgggcctattgacttccaagtccgcgagccgccgtccccattgtttgcatcactacgccacactagcacagccattgagctccagatcacacccgagtacctgggccaaaactgccacttggtatatcttgcgccacaatggaaggaaattctagaattcgacatgagggccgataacaccgaatcaagagtcaaggacattgtcagtggaaagcgtttcaaacgaccaatcggcggatatgctggcgtctctggcgttggttctaatacgacatggctgggaagccatcttgccatgtcgaacttgtatgcctttggacggctagcctgggatgcgtctagtggctcggaaacgattctccaggattggattcgtttgacgtttgggttcgaccaggatgtccttgacaccgtcacagacatgtctatgaagtcgtggcccgcatacgagaactacagcggcaaccttggtatccagacactgacagatattctctacacccactacgggcccaacccagcttctcaagatggcaacggctggggtcaatggacgcgcgccgacggctttagcattggcatggaccgcacggtacgaaatggtactaagaatgccggacagtacccgcccgagattgcacggatatgggaaaacattgagctgactccggataatcttgtgctttggttccaccatgtgccgtatacgcatcggttaaagtccaacaagacggttattcagcacttctacgacgcgcattatgagggagcgcagacggcgcaggagtttgtccgccaatgggagtctctggagggtaagattgacaaggagcggttcgagcaagtcttgttcagacagacgtatcaagctggacatgcgctcgtgtggcgcgacgccatcaacgaattttacttcaacctgtcgcggataccagacgaggccaagcgagtgggcaactacccgtaccggattgaggcggagagcatgacgctgcagaactacaaggtggttgcggtgaagccatttgagacggcgtctggattcaaaggcattgtgacgacgtcgaatgggacgactggtgtagcgaaagccaaggtgccattcgcgagcgggaggtacaatgtggcggttaactactgggacatgattggcggcaggtcgaagtatcagctcagtcttgggaaccggaccgtaggattgtggacgggcgacctggaggacaagctgggccacgcgccatccgtgtatctcgatggacactcagcgacgaggatcacgttccggaacgtgtgggtagagcggggagaggaggtgcgcatcagtggacaggcgaacggagccgagccagcgcctgtcgactatgtttcctttttgccatcggggattgttgactga

SEQ ID NO: 652 - protein, 835 aa, Cochliobolus heterostrophus ATCC 48331
  SIGNAL (1)...(17)
  DOMAIN (23)...(138): Glycosyl hydrolase family 67 N-terminus
  DOMAIN (139)...(463): Glycosyl hydrolase family 67 middle domain
  DOMAIN (464)...(690): Glycosyl hydrolase family 67 C-terminus
  SITE (47)...(50): N-glycosylation site. Prosite id = PS00001
  SITE (148)...(151): N-glycosylation site. Prosite id = PS00001
  SITE (194)...(197): N-glycosylation site. Prosite id = PS00001
  SITE (278)...(281): N-glycosylation site. Prosite id = PS00001
  SITE (309)...(312): N-glycosylation site. Prosite id = PS00001
  SITE (467)...(470): N-glycosylation site. Prosite id = PS00001
  SITE (530)...(533): N-glycosylation site. Prosite id = PS00001
  SITE (579)...(582): N-glycosylation site. Prosite id = PS00001
  SITE (622)...(625): N-glycosylation site. Prosite id = PS00001
  SITE (687)...(690): N-glycosylation site. Prosite id = PS00001
  SITE (738)...(741): N-glycosylation site. Prosite id = PS00001
  SITE (777)...(780): N-glycosylation site. Prosite id = PS00001
MRLLFTTLLWAVGGALAEDGSQGWLRYARIPNGASAQSVPSTIIALNSTRISPVYTAGQELQRGVLGTTSKQLTVSTTASQDQSAIIVGTTEAYSKAYGKIGESEDLEDDGFYLSISPGKVIIIGQNERGALYGAFEYLSQLAQNNITFGSKVYNPQAPIRWVNEWDNLDGSIERGYAGPSIFFRNGYVVDNTTRIAEYARLLASIRVNGAIVNNVNADPALLNDRNVAGLGRIADAMRPYGVQIGISLYFASPQQSLGTFDPLDPRVDAWWANITNQIYSKVPDMAGYLVKANSEGQPGPLTYNRTLADGANMFARALKPHGGVVMFRAFVYDNNLNPADWYADRANAQLEFFQHLDGKFDENIVLQIKFGPIDFQVREPPSPLFASLRHTSTAIELQITPEYLGQNCHLVYLAPQWKEILEFDMRADNTESRVKDIVSGKRFKRPIGGYAGVSGVGSNTTWLGSHLAMSNLYAFGRLAWDASSGSETILQDWIRLTFGFDQDVLDTVTDMSMKSWPAYENYSGNLGIQTLTDILYTHYGPNPASQDGNGWGQWTRADGFSIGMDRTVRNGTKNAGQYPPEIARIWENIELTPDNLVLWFHHVPYTHRLKSNKTVIQHFYDAHYEGAQTAQEFVRQWESLEGKIDKERFEQVLFRQTYQAGHALVWRDAINEFYFNLSRIPDEAKRVGNYPYRIEAESMTLQNYKVVAVKPFETASGFKGIVTTSNGTTGVAKAKVPFASGRYNVAVNYWDMIGGRSKYQLSLGNRTVGLWTGDLEDKLGHAPSVYLDGHSATRITFRNVWVERGEEVRISGQANGAEPAPVDYVSFLPSGIVD

SEQ ID NO: 653 - DNA, 2046 bp, Unknown
  Obtained from environmental sample
atgaaaaacgtccaatccttctatttaaaagcattattcgctgctctttttcttttttcgttatggttaaaagccgatgacggaagccgattatggctgcgttatcctcaaaataaacagaccagaaacattgtgacctccaatgcaaaaagtgccactttggaaattgcaaaaaaagaattgaacaaccattggcagggacaaaaaatcgatttgaaaatcgaaaaattgcctataagttttaaagacggatataaaatagtttcaacgaaagataagatcacgatttcggcgagaacagattttggtttgctctatggaacgtatcatttactgaatttacaacttcaaaaagccaatacttcaaatttaaaaattgaagaaaagccttcgtatgacgttcgcatcctcaaccattgggacaatctggatggatcgattgaacgtggttatgcgggacattccctttggaaatgggaagatttgcccggaaaaatttcgcctcggtacgaagaatatgcacgtgcaaatgcctcgatcggaattaatgcatcggttttaaacaacgtaaatgcatccccgaatatgctcaaaagcgattacttgcaaaaagtgaaagcgattgcagatgtgtttcgtccttatggaattaaagtctacctgtctgttaatttttcgtctccaaaagtgattggcggaacaaaagattcggatccgttgaacccagaagtacaacaatggtggaaacagaaagtaaaagaaatctacggacttatccctgattttggcggttttctggtaaaagctaattctgaggggcaaccaggtccgcaggattacggaagaacacatgctgacggtgccaatatgcttgcggatgccctgcaaccctacaacggaattgtgatgtggcgcgcattcgtgtacagtccgagtcaagatgaccgtgcaaaacaggcttattcagaatttgttcctttggatggaaaattcagagacaatgtgattattcagataaaaaacggaccgattgattttcagcctcgtgaaccttttaccccgcttttcggtgcgttaaaaaaaacttccgagatgattgaatttcaaattactcaggaatatttaggattttccaaccacttggtgtttctctcgcctttgtttaaagaaactttggaaagcgacacctactctgacggaaagggttcaacgattgccaaaattactgatgggactttgcgcactgcaaaagttacagcaatttccggtgtaacaaatatcggggaagatgcaaattggacaggacatcattttgcacaggcaaactggtatgctttcggaagacttgcttggaatcacgaattaagttccgaacagatcgccgatgagtggataaaaatgacgttcaccgataaaaaagaatttttgaaaccggtaaaggaaatgatgctgtcctccagagaagccgccgtcgattatatgatgccgcttggactggttcatatctttgcctgggatcatcattacggacccgaaccctggggagatcataaaggaagccgtgcggattggtcgcctgtttattatcacagagcagatggtgtaggattaggattcgacaggacaaagaccggaagcgatgcggtttcccaatattttccaccccttaacgagatttacggcaaccttcagcaatgtcccgaaagatatctgttgtttttccatcatgttccctggactttcaagatgaaaagcggaaacatcatgtgggacgaacttgccctgaaataccaatccggaatcaatcaggttcgtggttttcagaaggtttgggaaagcatgaaaccctatgtggacgctcagcgttttaatgatgtaaaacaaaggcttgaaattcaatcacatgatgccgtttggtggaaagacgcctgtctccaatattttcaggaattctcaaaactgccttttccgaaaggggttgaaaaaccagaaagacctttagaggaactcaaaaaaataaaactcaacatgggtaaccataattaa

SEQ ID NO: 654 - protein, 681 aa, Unknown
  Obtained from environmental sample
  SIGNAL (1)...(25)
  DOMAIN (112)...(433): Glycosyl hydrolase family 67 middle domain
  DOMAIN (434)...(665): Glycosyl hydrolase family 67 C-terminus
  SITE (121)...(124): N-glycosylation site. Prosite id = PS00001
  SITE (179)...(182): N-glycosylation site. Prosite id = PS00001
  SITE (185)...(188): N-glycosylation site. Prosite id = PS00001
  SITE (227)...(230): N-glycosylation site. Prosite id = PS00001
  SITE (438)...(441): N-glycosylation site. Prosite id = PS00001
MKNVQSFYLKALFAALFLFSLWLKADDGSRLWLRYPQNKQTRNIVTSNAKSATLEIAKKELNNHWQGQKIDLKIEKLPISFKDGYKIVSTKDKITISARTDFGLLYGTYHLLNLQLQKANTSNLKIEEKPSYDVRILNHWDNLDGSIERGYAGHSLWKWEDLPGKISPRYEEYARANASIGINASVLNNVNASPNMLKSDYLQKVKAIADVFRPYGIKVYLSVNFSSPKVIGGTKDSDPLNPEVQQWWKQKVKEIYGLIPDFGGFLVKANSEGQPGPQDYGRTHADGANMLADALQPYNGIVMWRAFVYSPSQDDRAKQAYSEFVPLDGKFRDNVIIQIKNGPIDFQPREPFTPLFGALKKTSEMIEFQITQEYLGFSNHLVFLSPLFKETLESDTYSDGKGSTIAKITDGTLRTAKVTAISGVTNIGEDANWTGHHFAQANWYAFGRLAWNHELSSEQIADEWIKMTFTDKKEFLKPVKEMMLSSREAAVDYMMPLGLVHIFAWDHHYGPEPWGDHKGSRADWSPVYYHRADGVGLGFDRTKTGSDAVSQYFPPLNEIYGNLQQCPERYLLFFHHVPWTFKMKSGNIMWDELALKYQSGINQVRGFQKVWESMKPYVDAQRFNDVKQRLEIQSHDAVWWKDACLQYFQEFSKLPFPKGVEKPERPLEELKKIKLNMGNHN

SEQ ID NO: 655 - DNA, 966 bp, Unknown
  Obtained from environmental sample
atgaaaaaagcaaaatatcttttcccgaatgactatatggcagatccttctgcgcacgtttttgaaggaaaaatctacatatatccctctcacgaccgagaaagcggaattgaagaaaatgacaacggcgatcattttgacatgaatgattaccatgtattttctcttgacgatgttgaaaatggagatatcaccgatcacggggtagtgctttccgtcaaggatattccgtggtcaggacgccaactttgggactgtgacgtggcagaaaaaaacggaaaatattatatgtattatccgctaaaagataaaacggatattttcagaatcggagtggcagtaggcgaaaaaccttacgggcctttcatccctgagaaacatccgattttaggaagctacagcattgatccttgtgtgtttgatgacaatggaacgcattatctgtatttcggaggaatctggggaggacaattacaacgttaccgtgagaataaagcattggaatgtgctgttattcctgaaaatgacgagcctgccatttcttcaaaagtagttcggctgagtgacgatatgcttgaatttgcggaggaacccaaagacttaaaaattcttgacgaaaacggaaacgaacttctgcacggagatccgcaccgtttttttgaagcatcttggatgcataagtacaacggaaaatattacttctcatattcaacgggagacacgcatcttctctgttacgcagtgggagacaatccttacggacctttcactttcaaaggggaaattttaacacctgttgtcggttggacaacgcatcacagtattgttgaattcaaaggaaaatggtatttgttcttccacgattctgtaccaagtggcggaagaacctggctaagaagtatgaaagtagtagaacttgagtacaataacgatggtaccatcaaaactattgagggggaagaatag

SEQ ID NO: 656 - protein, 321 aa, Unknown
  Obtained from environmental sample
  DOMAIN (6)...(314): Glycosyl hydrolases family 43
  SITE (145)...(148): N-glycosylation site. Prosite id = PS00001
MKKAKYLFPNDYMADPSAHVFEGKIYIYPSHDRESGIEENDNGDHFDMNDYHVFSLDDVENGDITDHGVVLSVKDIPWSGRQLWDCDVAEKNGKYYMYYPLKDKTDIFRIGVAVGEKPYGPFIPEKHPILGSYSIDPCVFDDNGTHYLYFGGIWGGQLQRYRENKALECAVIPENDEPAISSKVVRLSDDMLEFAEEPKDLKILDENGNELLHGDPHRFFEASWMHKYNGKYYFSYSTGDTHLLCYAVGDNPYGPFTFKGEILTPVVGWTTHHSIVEFKGKWYLFFHDSVPSGGRTWLRSMKVVELEYNNDGTIKTIEGEE

SEQ ID NO: 657 - DNA, 3246 bp, Unknown
  Obtained from environmental sample
atgaaccacttcgcttcaaaatcgctgcgcatggcgtggcaacccggactgcttgcgacaaccgtgctgccgttggcggctgccgccccaataccagcgccgaatacggataccaaagtgagcaatacttcgtccatcaccactccggctgcggctccacagtcgcagccacaaccaacgcaagacgcaaacgctcccgcaccgcttaaagcggctttccgggataagtttctcatcggcgcggtgctgagtgacgctgcgctgcgaggcagtgcgcccgacaaggtggcgatagccaccacgcactttaacgcgctcaccgccgaaaacgccatgaagccagacgcgatgcaaccgcgcgaagggcagttcaacttcgctgcaggcgatcggctcgtcgaactcgccgaaaaaagcggcggtgtgcccatcggccacacgctggtgtggcacgcgcaaacaccgaagtggttttttgaagggccggatggacagcccgcgacgcgcgaactggctttggagcgcatgcgcaaacacatttccactgtggtggggcgctacaaagggcgcatcaaggagtgggatgtggtgaacgaagccatcaacgacggacccggtgtgctgcgtccctctccctggctcaaagccatcggcgaagattacatcgccgaagccttccgcgccgcgcacgccgccgaccccgacgcgattttgatttataacgattacaacatcgaactgggctacaaacggcccaaagcgctgcaactcctaaaatcgctcattgaccagaaagtgccgattcacgccgtgggcattcagggtcactggcgcatggacaacccgaacttcgccgaagtggaacaggccatcaaagagttttcggcgctggggttgaaagtcatgatcaccgaactcgacatcggcgtgctgccgacgcgttatcagggcgcggatatttcagcgaccgaaaccatgacgcccgaacagcgcgccgtgatgaacccctatacggacggattgccggacgatgtggcgcaaaagcacgccgagcgctatcgccaggcgtttgagatgttcctgcggcacaaagacaaaatcagtcgtgtgacattttggggtgtggacgacggcacttcgtggctgaacggtttcccggtgcgcggccgcaccgattatccgctgctatttgatcgtcagggcaagccaaaacccgcctttttcgcggtgcaaaacgcggcgatgggcgcaacagcgcaaccgagcgccagcgctcccgcaacgcatggcgccgctcctgcatccaccaacattcgcggcgccgagtttcctcgcgtggaaagcgacgggcgggtgacgtttcgcatcaaagcgcctgacgcgcaaaaagtgcaatttgatttaggtaagccttacgacgccacccgcgacgccgagggcaactggacggcgaccacagagccacaagtgcccggcttccattattattttttgattgtcgatggagtgcgcgtggccgacccggcgagcgaaaccttttacggtgcgggccgccagatgagcggcatcgaaattcccgatcccgacagcgcgttttattcgccgcaaaacgtgccgcatggcgaagtgcgcgaacgctggtatttttccaacaccacgcaggcgtggcggcgcatcttcatttatacgccgccgggttacgacaccgatcaggccatgcgttttcctgtgctgtatttgcagcacggcggtggcgaagacgaacgcggctggcccaatcaggggcgcgtgagctttatcatggacaatctcatcgcgcagggcaaagccaaaccgatgctggtggtgatggagcaaggctatgcgcgcaagcccgatgaaccgcaggtgccgctgcgcccgcccggaagcaacgccggagcgatgccgcccgactttaatcgcatgttcgccacgctgggcgaagtgttcaccaaagacctgattccgtttattgacgcaaattaccgcaccaaaaccgagcgcgaaaaccgcgcgatggccggactttcgatgggtggaatgcaaagtttcatcatcggcctggcgaacaccgatctattcgcgcacctcggcggtttcagcggcgcgggtggtggttttggcggcggcgccttcgacgccaaaaccgcgcacggcggtgtgatggccgatgccgatgccttcaacaaaaaagttcgcacgatgtttctcagcatcggcactgccgagaacgagcgttttcagagcagcgtgcgcggttaccgcgacgcgctgaccaaagcgggcatcaaaaccacgttctacgaatcgcccggcacttcgcacgagtggctgacatggcgccgcagcctgcgcgaattcgcgccgctcttgtttcaagaggccaacacgcagatcgagcgcggccccaatgcccgcccgattgcgccgcagccgattgttcttggcccgggcgacaagcccgccttccctccggcgccctccggtttcgatgcgcggcgcgatggcattccgcacggcgaaattaaacttgtggaatacccttctgccacggtcggcaccacgcgcaagatgcaggtctatacgccgccgggctacaacccgcaagaagaatatcccgtgctctatttgctgcacggcatcggcggcgacgagtgggaatggaaaaatggcggcacgcccgaagtgattctcgacaacctctacgctgagaagaaactccagccgatgatcgtggtgatgcccaatgggcgcgcgcaaaaagacgaccgtcctatcggcaacgtgttcgcttccgctccggcgtttgcgacgtttgagaaagatttgctgaacgacattatcccctttgttgagaagaattacccgaccaaaaccggcccgcaaaatcgcgctttggccggtctttcgatgggcggcgggcaatctctcaactttggcctcggcaacctcgacaccttcgcgtgggttggcggcttttcgtccgcgcccaacacgcgcagcggcgcaagtctactggccaatcccgacgacgccaaaaagaagctgaagctgctgtgggtttcgtgcggcgataaagacaatttgatgtttatcagccagcgcacgcaccgttatcttgccgagaataacgtgccgcacatctggcatgtacagcccggcggacacgacttcaaggtgtggaagcaagacctgtataacttcgcccaactgctattccgttaa

SEQ ID NO: 658 - protein, 1081 aa, Unknown
  Obtained from environmental sample
  SIGNAL (1)...(28)
  DOMAIN (68)...(414): Glycosyl hydrolase family 10
  DOMAIN (541)...(798): Putative esterase
  DOMAIN (848)...(1079): Putative esterase
  SITE (42)...(45): N-glycosylation site. Prosite id = PS00001
  SITE (302)...(312): Glycosyl hydrolases family 10 active site. Prosite id = PS00591
  SITE (488)...(491): N-glycosylation site. Prosite id = PS00001
  SITE (559)...(562): N-glycosylation site. Prosite id = PS00001
MNHFASKSLRMAWQPGLLATTVLPLAAAAPIPAPNTDTKVSNTSSITTPAAAPQSQPQPTQDANAPAPLKAAFRDKFLIGAVLSDAALRGSAPDKVAIATTHFNALTAENAMKPDAMQPREGQFNFAAGDRLVELAEKSGGVPIGHTLVWHAQTPKWFFEGPDGQPATRELALERMRKHISTVVGRYKGRIKEWDVVNEAINDGPGVLRPSPWLKAIGEDYIAEAFRAAHAADPDAILIYNDYNIELGYKRPKALQLLKSLIDQKVPIHAVGIQGHWRMDNPNFAEVEQAIKEFSALGLKVMITELDIGVLPTRYQGADISATETMTPEQRAVMNPYTDGLPDDVAQKHAERYRQAFEMFLRHKDKISRVTFWGVDDGTSWLNGFPVRGRTDYPLLFDRQGKPKPAFFAVQNAAMGATAQPSASAPATHGAAPASTNIRGAEFPRVESDGRVTFRIKAPDAQKVQFDLGKPYDATRDAEGNWTATTEPQVPGFHYYFLIVDGVRVADPASETFYGAGRQMSGIEIPDPDSAFYSPQNVPHGEVRERWYFSNTTQAWRRIFIYTPPGYDTDQAMRFPVLYLQHGGGEDERGWPNQGRVSFIMDNLIAQGKAKPMLVVMEQGYARKPDEPQVPLRPPGSNAGAMPPDFNRMFATLGEVFTKDLIPFIDANYRTKTERENRAMAGLSMGGMQSFIIGLANTDLFAHLGGFSGAGGGFGGGAFDAKTAHGGVMADADAFNKKVRTMFLSIGTAENERFQSSVRGYRDALTKAGIKTTFYESPGTSHEWLTWRRSLREFAPLLFQEANTQIERGPNARPIAPQPIVLGPGDKPAFPPAPSGFDARRDGIPHGEIKLVEYPSATVGTTRKMQVYTPPGYNPQEEYPVLYLLHGIGGDEWEWKNGGTPEVILDNLYAEKKLQPMIVVMPNGRAQKDDRPIGNVFASAPAFATFEKDLLNDIIPFVEKNYPTKTGPQNRALAGLSMGGGQSLNFGLGNLDTFAWVGGFSSAPNTRSGASLLANPDDAKKKLKLLWVSCGDKDNLMFISQRTHRYLAENNVPHIWHVQPGGHDFKVWKQDLYNFAQLLFR

SEQ ID NO: 659 - DNA, 1026 bp, Cochliobolus heterostrophus ATCC 48331
cgcagtctccctctgtatgagcacgctgctcttgagacgcgccagaacaccggcggtctgcccaacaccttcacctggtcatccagcggcgtcctcgtgtcgcccaagcaggacagccgtcaaatccagggtatcaaggacccgacgattatccagaacaatggtgtataccatgtctttgccagcacggccaaggaagcgggatacaacctagtctacttcaactttaccgacttcagcagggccaaccaggcgccattcttctacctcgaccagtcaggtatcggcacaggttaccgtgctgctcctcaagtcttctacttcgccccccagaagctctggtacctcatctaccaaaacggcaatgcagcatacagcaccaaccccgacatttccaacccacgaggctggaccgccccgcaagtcttctaccccaacggaaccccccagacgatccaaaacggcctaggaacgaccggctactgggtcgacatgtgggtaatctgcgacacggccctctgccacctgtactcatccgacgacaacggcggcctataccgcagccaaacgcccgtctcgcaattcccacgcggcatgaacgagcccgtggtaacgctcaaggccaacaaaaacgacctctttgaagcctcgaccgtgtacaacattgtaaacaccagcacctacctcctcatggtcgaatgcatcggctccggcaactcccccggcggcctgcgctacttccgctcctggaccacccagtccctcaccagcgacaagtggactccccttgccgcatcccagcaaacccctttcctcggcgccgctaacacccagttccccgccggccgctggtcccagagcttgtcccacggcgagctcgttcgcacaaatgtagaccagaggctccagattcgcccctgtgaaatgaggtacctctaccagggtatcgatcctaatgctacgggcacttacaatgccctgccctggaaactcgcccttgcaacccagacaaactccaagtgttag

SEQ ID NO: 660 - protein, 341 aa, Cochliobolus heterostrophus ATCC 48331
  DOMAIN (18)...(308): Glycosyl hydrolase family 62
  SITE (76)...(79): N-glycosylation site. Prosite id = PS00001
  SITE (227)...(230): N-glycosylation site. Prosite id = PS00001
  SITE (323)...(326): N-glycosylation site. Prosite id = PS00001
RSLPLYEHAALETRQNTGGLPNTFTWSSSGVLVSPKQDSRQIQGIKDPTIIQNNGVYHVFASTAKEAGYNLVYFNFTDFSRANQAPFFYLDQSGIGTGYRAAPQVFYFAPQKLWYLIYQNGNAAYSTNPDISNPRGWTAPQVFYPNGTPQTIQNGLGTTGYWVDMWVICDTALCHLYSSDDNGGLYRSQTPVSQFPRGMNEPVVTLKANKNDLFEASTVYNIVNTSTYLLMVECIGSGNSPGGLRYFRSWTTQSLTSDKWTPLAASQQTPFLGAANTQFPAGRWSQSLSHGELVRTNVDQRLQIRPCEMRYLYQGIDPNATGTYNALPWKLALATQTNSKC

SEQ ID NO: 661 - DNA, 831 bp, Cochliobolus heterostrophus ATCC 48331
ttgaaggatttcaccatctccagccttaacggcaagcacgttgtctatgctaccgaccacgacactggatccaactacggatccatggctttcagtcccttcactaacttcagcgacatggcctctgcttcccagatggccactcccttcactgctgttgcccctaccctcttccgcttcgctcccaagaacatctggatcttggcctaccagtggggacccaccaccttctcctacaggacttccagcgaccccaccaacgtcaacggctggggtcctgtccagactctcttctctggcaagatcaccggcagcagcactggtgctattgaccagactgtcattggtgacgccaacaacatgtacctcttcttcgccggtgacaacggcaagatctaccgttccagcatgcccaagggcaacttccctggcagcttcggcgctacttccaccgtcgtcatgagcgactccaccaacaacctcttcgaggctgttcaggtctacaccgtcaagggtggcggttacctcatgattgttgaggctgttggctctggcggccgttacttccgctctttcactgcctccagcctcagcggcagctggacccccaacgccgccaccgagagcaaccccttcgccggcaaggccaacagcggtgccacctggaccaacgacatctcccacggtgaccttgtcaaggtcaccaacgacgagaccatgaccgtcgacccttgcaacctgcagctgttgtaccagggtcgtgcccccagctctggtggcgactacgaccgtctcccctacaggcccgctgtccttaccctcaagaagtag

SEQ ID NO: 662 - protein, 276 aa, Cochliobolus heterostrophus ATCC 48331
  DOMAIN (1)...(246): Glycosyl hydrolase family 62
  SITE (36)...(39): N-glycosylation site. Prosite id = PS00001
MKDFTISSLNGKHVVYATDHDTGSNYGSMAFSPFTNFSDMASASQMATPFTAVAPTLFRFAPKNIWILAYQWGPTTFSYRTSSDPTNVNGWGPVQTLFSGKITGSSTGAIDQTVIGDANNMYLFFAGDNGKIYRSSMPKGNFPGSFGATSTVVMSDSTNNLFEAVQVYTVKGGGYLMIVEAVGSGGRYFRSFTASSLSGSWTPNAATESNPFAGKANSGATWTNDISHGDLVKVTNDETMTVDPCNLQLLYQGRAPSSGGDYDRLPYRPAVLTLKK

SEQ ID NO: 663 - DNA, 1116 bp, Cochliobolus heterostrophus ATCC 48331
caatctcccctgtacggccaatgtggtggtactggatggaccggtcccacaacatgcgtttccggcgcggtgtgtaacaaagtcaatgatttctattcccagtgcgttcctggtacgggtggcgggtctcccgctcccactactactggcaacagtaaccctgctcctactggaggcaatggtggaggaggctcaggagctgcaggtggattgcacgaaaaattcaaggccaagggaaagatctactatggcactgaaatcgaccactaccatctgaacaacgcccccctcatgacgattgccaagaacagcttcggacagatcacgcacgagaacagcttgaagtgggatgctactgaaccatcacgtggacaattctcgtttaccaatgccgacaaggtcgtcagctgggctacccagaacggaaagctcatgcgtggtcacacactgctctggcactcgcagctgccgtcgtgggttacgcagatcaacgaccgcgctaccctgacctccgtcatccagaaccacgtgacacagatcgtcacccactacaagggcaagatcttgcagtgggacgtcgttaacgagatctttgctgagaacggccaacttcgagacagtgtctttagtcgtgtcctcggcgaagactttgttggtatcgctttccgcgccgcacgcgccgctgatcccaacgctaagctctacatcaacgactacaacttggacagtgccaactacgccaaggtcaccacgggtatggtcgcacacgttaacaagtggatatcccaaggtatccccattgatggcattggcacacaggcccatcttgccgcacctggcggctggaacccagcttccggcgtccccaacgccctcaaggcactggccgccgccaatgtcaaggagattgccattacggagcttgatatcgccggcgccgcagcaaacgacttcctcaccgtcatgaacggttgtcttgccgtctcaaagtgtgttggtatcaccgtctggggtgtctccgacaaggacagctggcgcgccaacgaccgccctctcttgttcgacaccaactaccagccaaagcaggcctacaacacccttgttggagctttgtaa

SEQ ID NO: 664 - protein, 371 aa, Cochliobolus heterostrophus ATCC 48331
  DOMAIN (4)...(32): Fungal cellulose binding domain
  DOMAIN (70)...(371): Glycosyl hydrolase family 10
  SITE (8)...(35): Cellulose-binding domain, fungal type. Prosite id = PS00562
QSPLYGQCGGTGWTGPTTCVSGAVCNKVNDFYSQCVPGTGGGSPAPTTTGNSNPAPTGGNGGGGSGAAGGLHEKFKAKGKIYYGTEIDHYHLNNAPLMTIAKNSFGQITHENSLKWDATEPSRGQFSFTNADKVVSWATQNGKLMRGHTLLWHSQLPSWVTQINDRATLTSVIQNHVTQIVTHYKGKILQWDVVNEIFAENGQLRDSVFSRVLGEDFVGIAFRAARAADPNAKLYINDYNLDSANYAKVTTGMVAHVNKWISQGIPIDGIGTQAHLAAPGGWNPASGVPNALKALAAANVKEIAITELDIAGAAANDFLTVMNGCLAVSKCVGITVWGVSDKDSWRANDRPLLFDTNYQPKQAYNTLVGAL

SEQ ID NO: 665 - DNA, 1182 bp, Cochliobolus heterostrophus ATCC 48331
gtgcaccccaagctcaccacatggaagtgcaccaagcgcggcggatgcaaggcgcagaacactgccattgtcacagactcggctgcccaccccatctaccagaagaacaactcgaccctgggctgcggatcctggggtaacggtcccgaccccacggcctgccctacaaaggaggcctgcgccaagaactgcattatcgagggcatctccgactattcgactgtaggcgtcttcaccaagggcgccgacctccgaatggacatgtacaaccctgccggcaactttgtcagccccagagtctacctcctatccaaagacgagaagaactacgagatgcttcagctcactggtaatgagcttacctttgacgttgacatgtctaagttgccttgtggcatgaacggtgccctctacctgagtgagatgagagccgacggtggtcgctctaagctcaaccccaagggtgctgcctatggtacgggctactgtgacgcgcagtgcttcgtgaccccctggatcaacggtgaaggaaacatccaaaagcaaggtgtctgctgcaatgaaatggacatctgggaggccaacagccgctccacctcaatcgcaccgcacacatgtggcaagccaagcatctttggctgcaacggcgacgagtgcggcaagaccggtctctgtgataagaacggctgcgttgataatccatacaagacccgcggcgacaagtcctactacggcctgaacctcaaggtcgacacaaaccgccccttcactgtcgttacccagttccctgctaagaacggcgtgcttcaagccatcgtgcgcaaatacatccaagatggtgtcgtcatggacaacgccgtcaagaacatcaccatggaccaggcatactgctctgcacagggcggcgcggaaatgtacaaccagctcggaggccacaaggtcatgggtgatgccatgtcccgcggcatggtgcttgccatgagcatctggtgggacgagagcggcgccatgcagtggcttgacagcggtgcttccggtccatgcaatgccaccgagggtttccctgctgagattgtcaagaaggttaagaacccaactgtgactttcagcaagatcaagtggggcgagattggctcgaccttctcaacaaagaaggcgatggagaagcggtgggaggcttaa

SEQ ID NO: 666 - protein, 393 aa, Cochliobolus heterostrophus ATCC 48331
  DOMAIN (1)...(383): Glycosyl hydrolase family 7
  SITE (36)...(39): N-glycosylation site. Prosite id = PS00001
  SITE (197)...(200): N-glycosylation site. Prosite id = PS00001
  SITE (293)...(296): N-glycosylation site. Prosite id = PS00001
  SITE (354)...(357): N-glycosylation site. Prosite id = PS00001
MHPKLTTWKCTKRGGCKAQNTAIVTDSAAHPIYQKNNSTLGCGSWGNGPDPTACPTKEACAKNCIIEGISDYSTVGVFTKGADLRMDMYNPAGNFVSPRVYLLSKDEKNYEMLQLTGNELTFDVDMSKLPCGMNGALYLSEMRADGGRSKLNPKGAAYGTGYCDAQCFVTPWINGEGNIQKQGVCCNEMDIWEANSRSTSIAPHTCGKPSIFGCNGDECGKTGLCDKNGCVDNPYKTRGDKSYYGLNLKVDTNRPFTVVTQFPAKNGVLQAIVRKYIQDGVVMDNAVKNITMDQAYCSAQGGAEMYNQLGGHKVMGDAMSRGMVLAMSIWWDESGAMQWLDSGASGPCNATEGFPAEIVKKVKNPTVTFSKIKWGEIGSTFSTKKAMEKRWEA

SEQ ID NO: 667 - DNA, 2541 bp, Cochliobolus heterostrophus ATCC 48331
gtgaagatctacgacgcggctgaacaggtctttcagatccaggaatccgtctggcctcgccctgctgatgacgagggcaccgaccctgaaaagtcggctttgaccttcacttggaccgatagcccgttttcttttgccattaaacgtagggccaccaatgagacgctcttcgatacttcggcagcttctcttgttttcgagacgcagtaccttcgcttaagaaccgctctaccacctttgccaaacctgtacggtcttggtgaatcaacggatgctttccatctcaacaccaccaactatacgcgaactctttggaatcgagatgcctatggcacgccaccaggatccaacctctacggagctcacccgatctactttgatcaccgcggtgagaatggtactcacggtgttttcttggctagctctgagggtatggacatcaagattgatgatactgacggccagttccttgagtacaacactctcggtggtgttcttgacttctacttccttgctggacccggccctaaggaagttgcaactcaatactcagccctttctggcttgcctgctatgatgccttactggggtttcggctcacaccaatgcaagtatggctaccgtgatgtttgggaggttgccgaggttgtagcaaactactctgctgctgatatcccacttgagaccatgtggaccgatatcgactacatggagcttcgccgcttgttcaccctggatcccgagcgttacccgcttgagcttgttcgccagcttgtagactatttgcatgctcaccaacagcactacattctgatggtcaactccgctgtctggagcggtgactatgatgcctacaacaacggtgcaaagcttgaagtcttccagaagaagagcaacggctccttcgaacagggtgctgtctggccaggccctactgtctttccagattggttccatcccaacacccagaaatactgggatgaggaattcgctcgcttcttcgaccccgctactggtgttgatatcgatggactttggaatgacatgaatgaacccgccaacttctgcccatacccctgctcagaccctgaagcctattctgaggagtccaagaacccacccgagccaccggcggtgcgcacttctgcaggtcgccaaatccctggcttcccagcaggtttccagccacagtctaactctagcactgcaaggcgttctgttgtaaagggaccatctagcatgcgtccttccaagcgccaagcgcctaacagcgctggagatgctaagcacctcggtcttcccggtcgtgatctgatcaaccccaagtaccagatccacaacgaagccggttcaatcagcaacaggaccctggctacggatatcaagaattacgatggctcttatcactacgatacgcacaacttctggggctcgatgatgagcattacctctcacaagtctatgcaagctcgccgtcccgaaagacggccattcattatcactaggtcatctttccctggcctcggttcttatctcggaaagtggcttggtgacaacgtctccgagtgggcacaataccgcttctcgattgccggcatcttgaacttcaacaccatcttccagatccccatggtcggtccagatatttgcggtttcgccggaaacacgaccgagactctctgcgcccgctggaccactcttggtgctttctacccgttcatgaggaaccacgccggcgacacttccatcagccaagaatactatcgctggcctctcaccagggccgcagccaagaacgccatcgcagtcaggtacaggctcttggactacttctacacggccttccaccgccaggccaccaccggtctacccagcttgaaccccctcttcttccactaccccaccgacgccaaaaccttcggcattgagcaccagttcttctacggagacagcatcctcgtctcgcccgtcctcgaagaaaactccacctcagtctccatctacctccccaaagatgtcttctacgactactggaccggcgagcgcatccaaggaaacggcgagaacattaacctcactgacgtaggattcgacaccatccccctccacgtcaaaggtggatccatcctccctctccgcgccgaatccgcaaacacaaccaccgagctccgcaaacaaaactttgtcctctggatcgcaccaaatgctaccaaccaagcctctggctcgctctacctcgatgatggagattccctcgagcagaagtctacttcgctcattaacttctccttcaacaacggcgccttcagcatgagcggcgatttcggattcgagactgagcttgtcattcagaatatcaccatcctgggtacctcgcagagcgtacagggccctgttgcgcttaccaagggctgggaacataactttggggctggtgctggtatgccgcagtttgatagtggtgcagccgagtcgcgtcgagttgttgctgcagtttggggtttggttgcgggggctgtcagtgtttggttcagcttgtaa

SEQ ID NO: 668 - protein, 846 aa, Cochliobolus heterostrophus ATCC 48331
  DOMAIN (169)...(710): Glycosyl hydrolases family 31
  SITE (53)...(56): N-glycosylation site. Prosite id = PS00001
  SITE (97)...(100): N-glycosylation site. Prosite id = PS00001
  SITE (134)...(137): N-glycosylation site. Prosite id = PS00001
  SITE (222)...(225): N-glycosylation site. Prosite id = PS00001
  SITE (303)...(306): N-glycosylation site. Prosite id = PS00001
  SITE (349)...(356): Glycosyl hydrolases family 31 active site. Prosite id = PS00129
  SITE (405)...(408): N-glycosylation site. Prosite id = PS00001
  SITE (554)...(584): Glycosyl hydrolases family 31 signature 2. Prosite id = PS00707
  SITE (563)...(566): N-glycosylation site. Prosite id = PS00001
  SITE (671)...(674): N-glycosylation site. Prosite id = PS00001
  SITE (701)...(704): N-glycosylation site. Prosite id = PS00001
  SITE (729)...(732): N-glycosylation site. Prosite id = PS00001
  SITE (746)...(749): N-glycosylation site. Prosite id = PS00001
  SITE (772)...(775): N-glycosylation site. Prosite id = PS00001
  SITE (797)...(800): N-glycosylation site. Prosite id = PS00001
MKIYDAAEQVFQIQESVWPRPADDEGTDPEKSALTFTWTDSPFSFAIKRRATNETLFDTSAASLVFETQYLRLRTALPPLPNLYGLGESTDAFHLNTTNYTRTLWNRDAYGTPPGSNLYGAHPIYFDHRGENGTHGVFLASSEGMDIKIDDTDGQFLEYNTLGGVLDFYFLAGPGPKEVATQYSALSGLPAMMPYWGFGSHQCKYGYRDVWEVAEVVANYSAADIPLETMWTDIDYMELRRLFTLDPERYPLELVRQLVDYLHAHQQHYILMVNSAVWSGDYDAYNNGAKLEVFQKKSNGSFEQGAVWPGPTVFPDWFHPNTQKYWDEEFARFFDPATGVDIDGLWNDMNEPANFCPYPCSDPEAYSEESKNPPEPPAVRTSAGRQIPGFPAGFQPQSNSSTARRSVVKGPSSMRPSKRQAPNSAGDAKHLGLPGRDLINPKYQIHNEAGSISNRTLATDIKNYDGSYHYDTHNFWGSMMSITSHKSMQARRPERRPFIITRSSFPGLGSYLGKWLGDNVSEWAQYRFSIAGILNFNTIFQIPMVGPDICGFAGNTTETLCARWTTLGAFYPFMRNHAGDTSISQEYYRWPLTRAAAKNAIAVRYRLLDYFYTAFHRQATTGLPSLNPLFFHYPTDAKTFGIEHQFFYGDSILVSPVLEENSTSVSIYLPKDVFYDYWTGERIQGNGENINLTDVGFDTIPLHVKGGSILPLRAESANTTTELRKQNFVLWIAPNATNQASGSLYLDDGDSLEQKSTSLINFSFNNGAFSMSGDFGFETELVIQNITILGTSQSVQGPVALTKGWEHNFGAGAGMPQFDSGAAESRRVVAAVWGLVAGAVSVWFSL

SEQ ID NO: 669 - DNA, 2307 bp, Unknown
  Obtained from environmental sample
atgaaattagagcataaaaaaaacgcagacgccccgtatcaaaatcctgaattgcccatcgacaaacgtctggaagatttgctttcccgcatgacggtggaagagaaagtcgctcagatgaccggcgtctggaacgacaaagccaccactctggtggatgaaaacggcgatttcgatttcgagaaagccaaaaagtcgtacagccacggtcatggtctcggacaggttgggcgccccaacgatgccggcggaggaaagaacgcccgcgagatggtggagctcaccaatgccatccagaaattttttatggagaacagccggctgggcattcctgtgtttttccacgaggagtgtttgcacggcctcgccgctccggacggcaccagtttcccgcagccgattgcgctgggcggttcgtttcatcccgagctggtcgaaaaattatatgccatgacggctgaggaaacccgggtgcgtggtggccatcaagcgctgacgcccgtggtggatgtggcccgtgagccgcgctggggccgggtggaagagaccttcggagaagatccgtatctggttacccagatgggcatggccgccgtgcgtggcttccagggtgatgcggaatttgataacaaaaagcacgtagtggctacgctgaagcactttgccgcccacggtcagcccgaatccggaatgaactgcgcgccggtgaacgtctctgagcgcgttcttcgcgaaacatttttgtatccgttcaaagatgccatccagaaaaccaacgctctcagcgtgatggcatcctataacgaaattgacggcgtaccttcgcatgccaatccctggttgctgcgtgatgtgctgcgcgatgaatggggcttcaaaggatttgtggtttccgattactacgccgtttgggagctgaatgatcgccccgatacgcacggacattttgtggccaaagatcacaaacacgctgcaaaactggccgccgaagcaggcgtgaatgtggaattgcccgagccgctgtgttacccgcatctggttgatctggtcaaagagggcgaggtgaaggaaaccgttctggacgaactggtgcgcccgctgctctattggaaatttaaaatgggactgtttgaagatccgtttcttgatcccgccgtggccgagcgtatttccggatctaccgaaaaccggaaaattgcccttcaggcggcgcaggaatccatcaccctgctcaaaaacgagcaacagaccttgccactggccaaagacaaactcacaaaagttgcggtgattggtcccaacgccaatcgcagcatgctcggcggatacagcggaaagccgcgttacgatgtgagcgtactcgaaggcatcaccgccaaggtgggcgattcggtggaagtactgtaccacgagggatgtaaaatcaccgtgggcggaagctggaatgaagacgaagttgtagcctccgatccggtggaagaccgcaagatgattgccgaagccctcgaagtggccaagcaggctgatgtcattattctggcgattggcggcaatgagcaaacctcccgcgaatcctgggcgaccaaccacatgggcgatcgcaccaatctggagatggtagggctgcaaaacgaactggtcgaagccatgctcagcaccggaaagccggtggtggcctgcctcttcaacggaaagccgttgaccatcaactacgtgaaagacaacgtgcccgcgattgtggagtgctggtacatcggtcaggagaccggatttgcgctggcagatgtactgttcggcgattacaatccgggcggaaaacttcccatcacctttccacgctcagtgggccatattccggcgtactacaatcacaaaccatcttcacgacgcggctatctgttcgatgaagtcagcccgatgtatgcgtttggctacgggttgagctacaccaaattcgaactcagcaatctgcgcctggccgatacctccatcgccaaagatggcagcaccaaagtatttgtggatgtcaccaataccggcgaccgcgaaggctccgaagtggtacagatgtacattcgtgatctggtcagctcggtaacgcgtccggtgaaagaactcaaaggattcaagcgcgtgtggctgaagcccggcgaattgacaacggtggagctggagatcacaccagaatccctggcgttttacgatatccgcatgaactacgtcgtggagcccggcgatttcagcatcatggtgggcacatcctcccgtgacgaagatctgcagaatctcacgcttaccgtatattga

SEQ ID NO: 670 - protein, 768 aa, Unknown
  Obtained from environmental sample
  DOMAIN (102)...(338): Glycosyl hydrolase family 3 N terminal domain
  DOMAIN (408)...(651): Glycosyl hydrolase family 3 C terminal domain
  SITE (240)...(243): N-glycosylation site. Prosite id = PS00001
  SITE (289)...(306): Glycosyl hydrolases family 3 active site. Prosite id = PS00775
  SITE (442)...(445): N-glycosylation site. Prosite id = PS00001
  SITE (773)...(776): N-glycosylation site. Prosite id = PS00001
MKLEHKKNADAPYQNPELPIDKRLEDLLSRMTVEEKVAQMTGVWNDKATTLVDENGDFDFEKAKKSYSHGHGLGQVGRPNDAGGGKNAREMVELTNAIQKFFMENSRLGIPVFFHEECLHGLAAPDGTSFPQPIALGGSFHPELVEKLYAMTAEETRVRGGHQALTPVVDVAREPRWGRVEETFGEDPYLVTQMGMAAVRGFQGDAEFDNKKHVVATLKHFAAHGQPESGMNCAPVNVSERVLRETFLYPFKDAIQKTNALSVMASYNEIDGVPSHANPWLLRDVLRDEWGFKGFVVSDYYAVWELNDRPDTHGHFVAKDHKHAAKLAAEAGVNVELPEPLCYPHLVDLVKEGEVKETVLDELVRPLLYWKFKMGLFEDPFLDPAVAERISGSTENRKIALQAAQESITLLKNEQQTLPLAKDKLTKVAVIGPNANRSMLGGYSGKPRYDVSVLEGITAKVGDSVEVLYHEGCKITVGGSWNEDEVVASDPVEDRKMIAEALEVAKQADVIILAIGGNEQTSRESWATNHMGDRTNLEMVGLQNELVEAMLSTGKPVVACLFNGKPLTINYVKDNVPAIVECWYIGQETGFALADVLFGDYNPGGKLPITFPRSVGHIPAYYNHKPSSRRGYLFDEVSPMYAFGYGLSYTKFELSNLRLADTSIAKDGSTKVFVDVTNTGDREGSEVVQMYIRDLVSSVTRPVKELKGFKRVWLKPGELTTVELEITPESLAFYDIRMNYVVEPGDFSIMVGTSSRDEDLQNLTLTVY

SEQ ID NO: 671 - DNA, 1572 bp, Unknown
  Obtained from environmental sample
atgaccctagccaatccggttctttccgggttcaaccccgatccgtccattctgcgggtcggtgatgattactacattgccacgtccacctttgagtggtttcccggagtgcagatactgcactccagggacctggtgcattggcgacagatcgcctttccgctgaatcgctactcgcaactggatttgcgcggtcatcccaactccgccggagtctgggcgccgtgtctgagctacagcgacgggctcttctatctgatctttaccgacacgcgcagctggaccggagccttcaaggatacgcacaactatctggtaaccgcgccggcgattaccggcccctggtccgaaccggtgtacctgaacagttccggttttgatccctccctgtttcacgacgacgatggccgcaagtggctggtcaacatggtgtgggaccaccggccggagcgaccgcacttcggtggcatactgttacaggagtacgacccggagcagcagcgtctgacggggccggtgcgcaacatctttcgcggtaccgaactgggattggtggaaggcccgcatctgtacaaggtggacggctactattacctgctgaccgccgagggtggtacctttctcactcacgccgccactgtggcacggtcccgggacatcggcggtccctatgaagtgatgcccggcaatccgctgatcaccagcgcccatcgacctgaactgcggctcaagtccgccggtcacggctcgctggtacagcatcgcgatggcagttggagcctggcgcatctgtgtcgccgccacctgcccaatggccgcgccattctcgggcgggagacggccctgcagaatatcgagtgggtggatggctggccgcgactggcgtccggcgatgtggtgccgctggatgagttccagccgccgccactgccgccacatccctggccacccgaaccggcccgggatgatttcgatgcgccggaactggcgctgtgctggcaggcgcccagagtcgcgctggacgggcagatgctcagcctgagtgagcggccagggcacttgcgtctgtttggccgcgagagcccgcgctcgcactttgaacagagtctggtggcgcggcggcagcaggcgtttcatattgaggcgtccacctgtctgcgtttcgagccggagcattttcagcagatggccggtctgatggcctactacaacaccgataatttctattacctgtttgtctcccggtccgagcatgcacagaagtgtctgggcttgatgcgctgtgaacagggtcaggtttcctggcccattgaaaaggaatacccgctggacaattgggagagcatctacctgaaactggtgatcgaccaccagcgcatcaatttctactattcaccggacggcgaacactggacgattgccgggtttgagcaggacgcgtcgatactgtccgatgaacacgccgtgcctctgggttttaccggaaactttgtcggtatggcgtgtcaggatctgtcgggtacccgcagggcggccgacttcgattggtttgaatatcgggagatggggtaa

SEQ ID NO: 672 - protein, 523 aa, Unknown
  Obtained from environmental sample
  DOMAIN (3)...(292): Glycosyl hydrolases family 43
  SITE (123)...(126): N-glycosylation site. Prosite id = PS00001
MTLANPVLSGFNPDPSILRVGDDYYIATSTFEWFPGVQILHSRDLVHWRQIAFPLNRYSQLDLRGHPNSAGVWAPCLSYSDGLFYLIFTDTRSWTGAFKDTHNYLVTAPAITGPWSEPVYLNSSGFDPSLFHDDDGRKWLVNMVWDHRPERPHFGGILLQEYDPEQQRLTGPVRNIFRGTELGLVEGPHLYKVDGYYYLLTAEGGTFLTHAATVARSRDIGGPYEVMPGNPLITSAHRPELRLKSAGHGSLVQHRDGSWSLAHLCRRHLPNGRAILGRETALQNIEWVDGWPRLASGDVVPLDEFQPPPLPPHPWPPEPARDDFDAPELALCWQAPRVALDGQMLSLSERPGHLRLFGRESPRSHFEQSLVARRQQAFHIEASTCLRFEPEHFQQMAGLMAYYNTDNFYYLFVSRSEHAQKCLGLMRCEQGQVSWPIEKEYPLDNWESIYLKLVIDHQRINFYYSPDGEHWTIAGFEQDASILSDEHAVPLGFTGNFVGMACQDLSGTRRAADFDWFEYREMG

SEQ ID NO: 673 - DNA, 1506 bp, Unknown
  Obtained from environmental sample
atgaagaaagcaaggataataatagataaggattttaccataggcgagatcgacaagaggatattcggctcctttatagagcatctgggccgcgccgtgtacggaggcatatatgagccgggtcatcccgaggctgatgagctgggctttcgtaaggatgttttaggcctggtaaaaaagctcaatataccggtagtccgctatcccggcggaaatttcgtatccggctttaactgggaggacagcgtaggacccagggagaagcgcccgaagaggctggatctggcctggtttactacggagacgaacgaggtggggcttcatgaattcgcggactggacgaagaaggccggaagtgagcttatgtatgcggtaaacttaggcagcaggggccccgagcaggccagggatattgtggaatatgccaatcatatttccggcagcaaatattccgatatgcgtattgccaacggaagaaaggagcccttcgggataaagctctggtgcctgggcaatgagatggacgggccctggcagatggggcagaagagcgcaagggaatatggccgggtggccaatgaagccgccaagatgatgaaatgggtggatccctccatcgaggtagtggcctgcggctcctcctctacggagatgcccaccttcggctcctgggagctggaaatgctggaggaatgctatgaaaacgtggattatgtatccctccacaggtattacggcaatcccaccggggatacaccgggcttccttgccaggaccatggatatggacggctttataaaaagcgttgccgcgatctgtgatgcggtcaggggaaagaagcacagctcccatatcgtgaatctttcctttgatgaatggaatgtctggtatcattcaaacgagcaggataaggagatctggaagcaggacaaatggaacagggcccttccgcttctggaggatgtttataattttgaggatgcactcctggtgggttcaatgctcatcacccttattaaaaacgctgacagggtaaagatagcctgcctggcccagctcgttaatgtcatcgcacccatcatgaccaggaacggcgggggagtatgggcccagaccaccttttatccctttatgcatgcctctctttacggccgcggtgtcgcgctcaatgcccttacagacagtcccgtttattcctgtgaggactatgaaaatgtacccttcatagacgctgcggcggtgatggatggcgatgagcttaccgtttttgcggttaaccgggatatggaggaggattacgagctggagcttgacttaaggtgctttaaggagctgtctgtaaaggagcacatcctgctgcatcatgatgacgtaaaggcggtcaataccgaggaggcccctgaaaccgttgtccctgtggcaggaccgggcggaaggctcgagggaggaaaggcgacggtcaggataccggccttaagctggaatgtgatacgttttacggtataa

SEQ ID NO: 674 - protein, 501 aa, Unknown
  Obtained from environmental sample
  DOMAIN (291)...(493): Alpha-L-arabinofuranosidase C-terminus
  SITE (291)...(294): N-glycosylation site. Prosite id = PS00001
MKKARIIIDKDFTIGEIDKRIFGSFIEHLGRAVYGGIYEPGHPEADELGFRKDVLGLVKKLNIPVVRYPGGNFVSGFNWEDSVGPREKRPKRLDLAWFTTETNEVGLHEFADWTKKAGSELMYAVNLGSRGPEQARDIVEYANHISGSKYSDMRIANGRKEPFGIKLWCLGNEMDGPWQMGQKSAREYGRVANEAAKMMKWVDPSIEVVACGSSSTEMPTFGSWELEMLEECYENVDYVSLHRYYGNPTGDTPGFLARTMDMDGFIKSVAAICDAVRGKKHSSHIVNLSFDEWNVWYHSNEQDKEIWKQDKWNRALPLLEDVYNFEDALLVGSMLITLIKNADRVKIACLAQLVNVIAPIMTRNGGGVWAQTTFYPFMHASLYGRGVALNALTDSPVYSCEDYENVPFIDAAAVMDGDELTVFAVNRDMEEDYELELDLRCFKELSVKEHILLHHDDVKAVNTEEAPETVVPVAGPGGRLEGGKATVRIPALSWNVIRFTV

SEQ ID NO: 675 - DNA, 1482 bp, Unknown
  Obtained from environmental sample
atgaagcacatctccatgcttgtcaacgccagagacgtcattgcccgcatccgcccggagatctacggccacttcgccgagcatctgggccgctgcatctacggcggcatcttcgtcggcgaaaacagccccatccccaatgtaaagggcatccgcaaggacgtcatcgacgccttccgccacattcaggtacccaccatccgctggcccggcggctgcttcgccgaggaataccactggcaggacggcgtcggcccgctggaaaaccgcaagaagatggtcaacatcaactggggcgcggtggtggaggacaattccttcggtacccacgagtacatggccctgtgcgagctgatcggctccaggccctacatcaacggcaacgtcggctccggcacggtgcaggaaatggccgaatgggtagagtacatgaccgccgtgggcacccctctggccgagcagcggaaagagaacggtcaggacgaaccctggaaggtgcccttcctgggcgtgggcaacgagaactggggctgcggcggcgaaatgaccgccgagacctacgccgccgaattccgccgctacgccgccttctgccgcgagcacaacggcaaccacctctgccgcatcgcctgtggcccgtcctctgccgatttcggctggatggagacgatgatgaaggccatctcgaagggctggggcggttaccccctggccggcggcatcgacctgcattactataccatgcccatccacccgaagatggactccgccacgaagttctccgacgaggagcactacgccaccatggacagcgccttctactgcgacgagctgctgacccgccacaccgagatcatgaaccgctacgacccggagaacagggtgggcctcgtcatcggcgaatggggctgctggcacgaggtggagcccggcaccaaccccggcttcctctatcaacagaacgccatgcgcgacgcgctggtggccgccatccacctcaacatcttcaaccgccacgcaaagcgcgtcatgatggccaaccttgcccagaccgtcaacgtcctgcaggccatcctcctcaccgacggcgaccagctggtcaaaacccccacctattacgtcttcgacctgtacaaggcccatcaaaacggcgccgccgtgtactgctacaccgatgacgagaaggccgccgggggctataaggctccgatgatctcctcctcctgctcggtcaaggacggcgtcatgaccctgacgctggccaattgctccctgacggaggaggccgccatcgactgcgacctctgccacttcgccgctgcggaggccaccgcccgcatcctcaccgcggacgtgcgtgccttcaacgactttgaacacccggaggacgtcgtcatccaccccttcgacgtgaacctcaccggcggcaggctgaccctgaccctgccgccctgctccgtggcggaggtcaccctgcgctga

SEQ ID NO: 676 - protein, 493 aa, Unknown
  Obtained from environmental sample
  DOMAIN (300)...(486): Alpha-L-arabinofuranosidase C-terminus
  SITE (428)...(431): N-glycosylation site. Prosite id = PS00001
  SITE (479)...(482): N-glycosylation site. Prosite id = PS00001
MKHISMLVNARDVIARIRPEIYGHFAEHLGRCIYGGIFVGENSPIPNVKGIRKDVIDAFRHIQVPTIRWPGGCFAEEYHWQDGVGPLENRKKMVNINWGAVVEDNSFGTHEYMALCELIGSRPYINGNVGSGTVQEMAEWVEYMTAVGTPLAEQRKENGQDEPWKVPFLGVGNENWGCGGEMTAETYAAEFRRYAAFCREHNGNHLCRIACGPSSADFGWMETMMKAISKGWGGYPLAGGIDLHYYTMPIHPKMDSATKFSDEEHYATMDSAFYCDELLTRHTEIMNRYDPENRVGLVIGEWGCWHEVEPGTNPGFLYQQNAMRDALVAAIHLNIFNRHAKRVMMANLAQTVNVLQAILLTDGDQLVKTPTYYVFDLYKAHQNGAAVYCYTDDEKAAGGYKAPMISSSCSVKDGVMTLTLANCSLTEEAAIDCDLCHFAAAEATARILTADVRAFNDFEHPEDVVIHPFDVNLTGGRLTLTLPPCSVAEVTLR

SEQ ID NO: 677 - DNA, 1566 bp, Unknown
  Obtained from environmental sample
atgttcgatagagttgcgcgcggcgcgctagcgctcgcggtcacatgtgcgttcgtgttgccggccgaagcagccgaaccgaccaataacgcgaccgtcacgatccatgcggatcgccccggtccgactatcagcaagtacgtgtatgggcaattcgcggaacatctgggtcgcggtgtctacgaagggatctgggtcggcgagaagtcttccattccaaacactcgcggctatcgcaacgatgtcgtggacgcagtcaaaaagctgcatgtgcccatcgtgcgttggcccggcggctgctttgccgacgagtatcattggcgcgaaggcattggtccgcgtgaccaacgtcctcgcaaggtcaacacttggtggggtggggtagccgagtcgaatgagttcggcacgcacgagttcctggacttcgctgagctgattggagccgacgcatatgtgaatggcaatgtcgggtccgctacgccgcaagaaatggccgagtgggtcgaatacatgacctcggattcggattcttcgctcgctcaactgcgacgcaagaacggccgcgacaaaccttggcacgttgcggtgttcgcagtcggcaatgagacctggggctgcggcggcaacatgcgtgcggagtactacgctgatctttatcggcagtattcgactttcatcaaagcgccaccgaacaacatgccgttgaagatcgcaagcggcgcgaacggtgacgactatcactggactgaagtcttgatgcagcaggcggcgaagatgatggatgccgcatccgtgcactactacacattgccgactggccaatggaagaagaagggcgctgcaatcggcttcaacgaagatgagtgggcgatgacgctgaagcgtgcacttcacatcgaagatcttgtgatcggtcactctgcggtgatggacaagtacgatcctgagaagaaggtcgccttgtacgtcgatgagtggggcacttggtatgacccagcaccgggcacgaacggcgccttcttgtggcagcagaacacgttgcgtgacgcgttggtcgcaggcctatcgctgaacgtgttccatcgtcatgcggatcgcgttcgtatggcgaacatcgcgcagatggtgaacgtcctgcaggcgatgatcctgacggataaggagaagatgctgctcacaccgacgtatcacgtcttcgagatgtactcagtgttccaagactccacgttcttgcccgtggacgtaatgacacccaagtatcgtcagagtgatgtggaactgcccactatcgatgtctccgtggccaaggcaaaaaatggccgagtgttcgcgtcgttcgtgaatctcgatcctgagcactcggcgacggtgaccagcaacatcgcaggcatggagatctctcgaatggagggacgtgtcgtgactgccgatgccatggacgctcacaacaccttcgagaaggcagatgccgtgaagcccgcgccgatcaagagcgtgcgtcgcgggggcaagctcgtgctggagttgcccgcgaaatccgtttcggtcgtcgagctgattcgctaa

SEQ ID NO: 678 - protein, 521 aa, Unknown
  Obtained from environmental sample
  SIGNAL (1)...(24)
  DOMAIN (324)...(513): Alpha-L-arabinofuranosidase C-terminus
  SITE (30)...(33): N-glycosylation site. Prosite id = PS00001
  SITE (204)...(207): N-glycosylation site. Prosite id = PS00001
MFDRVARGALALAVTCAFVLPAEAAEPTNNATVTIHADRPGPTISKYVYGQFAEHLGRGVYEGIWVGEKSSIPNTRGYRNDVVDAVKKLHVPIVRWPGGCFADEYHWREGIGPRDQRPRKVNTWWGGVAESNEFGTHEFLDFAELIGADAYVNGNVGSATPQEMAEWVEYMTSDSDSSLAQLRRKNGRDKPWHVAVFAVGNETWGCGGNMRAEYYADLYRQYSTFIKAPPNNMPLKIASGANGDDYHWTEVLMQQAAKMMDAASVHYYTLPTGQWKKKGAAIGFNEDEWAMTLKRALHIEDLVIGHSAVMDKYDPEKKVALYVDEWGTWYDPAPGTNGAFLWQQNTLRDALVAGLSLNVFHRHADRVRMANIAQMVNVLQAMILTDKEKMLLTPTYHVFEMYSVFQDSTFLPVDVMTPKYRQSDVELPTIDVSVAKAKNGRVFASFVNLDPEHSATVTSNIAGMEISRMEGRVVTADAMDAHNTFEKADAVKPAPIKSVRRGGKLVLELPAKSVSVVELIR

SEQ ID NO: 679 - DNA, 1020 bp, Unknown
  Obtained from environmental sample
atgagtgtcatccgcaaggcagcagggatcaaggacgcgtgggcccatgccttccgcgtcggaacggtcaccagcgccgaaattctcgcgaaaaacgtgacaagggaactgatacatacccatttctcgtcgctgacggcggaaaacgccatgaaaatggcccatatccatcccgaagaacgacggtgggatacagccgaggccgacgtcatcgcggatttcgcgcgggaatcctcaatattgttgcgtggcaacgcctttgtctgccaccggcaggtaccggaatgggtattcagggacggaaacggggcggtctcgcaggcgacgctctttggccggctggaatgccatatcgcggccatggccgaacggtacggcgacattgtctatgcctgggacgtcctcagcgaggtgatggacgccggatcgcccgacgggatgcgcatgagcgaatggtaccgcaccggcggcgccggactctgggaattcgctttcaggacggcgcatgccgccgcgccggaatcacgccttttctgcactgactatggcatcgagtcgggcatgaagatggacggaacgctgcgttttctttccggtctccttgacgccggggtcccggtgcacggaatcggcatagagggacactggaactacaaccatcccgacgaaaaaattctccgcaccgcgctcgaacgctactcggccctgggactggacatcgagctgaccgaggtcgacgtatccgcttacgggacggacgaggcgggaatacggtaccccgacataccgcaggaccggaagttcatgcaggcgcagcagttcaagaacatattccggatcgccgccgactatcccgccgtaaagaacatcaccctgaggggccccgccggcggccataccccgtttgacgattttcccgtgcgggactgcaggaactggccgctcctctttgacaccgaatacaaggcgaaaagcttcgtgcccgaactcatcgacaccggattctccctgacggactga

SEQ ID NO: 680 - protein, 339 aa, Unknown
  Obtained from environmental sample
  DOMAIN (9)...(330): Glycosyl hydrolase family 10
  SITE (32)...(35): N-glycosylation site. Prosite id = PS00001
  SITE (201)...(211): Serine proteases, subtilase family, aspartic acid active site. Prosite id = PS00136
  SITE (293)...(296): N-glycosylation site. Prosite id = PS00001
MSVIRKAAGIKDAWAHAFRVGTVTSAEILAKNVTRELIHTHFSSLTAENAMKMAHIHPEERRWDTAEADVIADFARESSILLRGNAFVCHRQVPEWVFRDGNGAVSQATLFGRLECHIAAMAERYGDIVYAWDVLSEVMDAGSPDGMRMSEWYRTGGAGLWEFAFRTAHAAAPESRLFCTDYGIESGMKMDGTLRFLSGLLDAGVPVHGIGIEGHWNYNHPDEKILRTALERYSALGLDIELTEVDVSAYGTDEAGIRYPDIPQDRKFMQAQQFKNIFRIAADYPAVKNITLRGPAGGHTPFDDFPVRDCRNWPLLFDTEYKAKSFVPELIDTGFSLTD

SEQ ID NO: 681 - DNA, 2094 bp, Unknown
  Obtained from environmental sample
atggacagagaacaagcaaaacggaaggcggaagcgctggtcggtcaaatgacggtggaggaggccgcttcgcagctgcggttcgacgcgccggccatcgaaagactgaacataccggcatacaactggtggaacgagggactgcacggcctggccagaagcggtgtcgccacgagctttccgcaggcgatcgccatggccgccgctttcgacccggacatgatggaacgggtgggcgacgtcatcgcaacggaagcccgcgccagatacaatacctcatccgtccgcggcgaccgcggtatctacaagggcctgaccatctggtctccgaacgtgaacatcttccgcgatccgagatggggacgcggtcacgagacctacggagaggacccgtatctgacctcccgcctgggcgtcggcttcgtcaaaggcttgcagggcgagggggaaacgcggaaggtcgcggcatgcgcgaagcatttcgccgtccactccgggccggaggacctgaggcacaggttcaacgcgaccgtctccgagaaggacctgtacgagacgtatctgcccgcctttaaggcgctcgtccgggaagcggacgtcgagaccgtcatgggcgcctacaaccgcacgaacggggaaccgtgctgcggcagtaagaagctgttaagggatattttgagagacgaatggggcttccgcggccacgtcgtcagcgattgctgggccgtgaaggatttccatgagaaccataaggttacggagggaccggagcagtccgtcaagctcgctttggagaacggctgcgacgtcaattgcggctgcacgtttcagttcgtgatgagtgcgtacgcgaagggactcatctcggaggaaaccatccgtacatccgccgtcaggttgtttaccacaaggtatcttctgggcatgatggaggggagcgcgttcgaccgtatcggcatcgaagcgctggaagcgaaggagcatctgtccgttgccggggaagccgccgaaaagggatgcgtgctgctgaaaaacaacggcttgctcccgctcgatgccggaagcatcaaaaagatcggcgtcatcggaccgaacgcgaacagcagggcggcgctcatcggcaactaccacgggacctcctcccgctacgtcaccgttctcgagggcatacaggactatctcggcgatgacgtgcgtgtgctgtattccgagggctgtgatatcagtaacgacaaggtggagcccctggcgcaggacggcgacagactgtccgaagcgcaggccgtggcggacgcgtccgacgttgtcgtgctcgtggtcggactgaatgagaatctcgagggcgaagagggcgacgcgggcaaccagtacgtctccggcgacaagcaggacctcctgctgccggccccgcagagaaagctgatgcaggcggtctttgcctcaaagaagccgacggtcatcgtactgatggcgggcagctccatcgacctggaggaatacggcgaaaaggcggatgcgatcttgctgccctggtatccgggcgcgcgcggcggcaaaacggtcgcggacatcctcttcggcagggtctccccgtccggcaagcttccggtcaccttctaccgcaacgaagatctcgaaaagatccccgcgtttacggattacggtatgaaaaaccagacttaccgctatctcgattttgcacccctctatccgttcggctacggcctgacctacggcgactgtgccgtcgaaacggccgaagcttgtaaaacgggcgatacggtccgggtaagggctaccgtaaagaatctttccggcgtcgcgacgcaggaggtcatacaggtctatgcccaaaatgagggaagcgctacggcgccccgcaacccgcggcttgtcggcttcaaacggatatcctgcccgccgcagcggagcgtaacggaagaatgggagtttaaggcggagctgctggataccgtgggagcggacggacgcccggtcttcgaggagcacgccacactgtacgtttctttgggacaaccggacgcgctgacggaaaaactgacgggacacgccgccatacggatcggcatctga

SEQ ID NO: 682 - protein, 697 aa, Unknown
  Obtained from environmental sample
  DOMAIN (30)...(273): Glycosyl hydrolase family 3 N terminal domain
  DOMAIN (340)...(580): Glycosyl hydrolase family 3 C terminal domain
  SITE (92)...(95): N-glycosylation site. Prosite id = PS00001
  SITE (177)...(180): N-glycosylation site. Prosite id = PS00001
  SITE (211)...(214): N-glycosylation site. Prosite id = PS00001
  SITE (566)...(569): N-glycosylation site. Prosite id = PS00001
  SITE (612)...(615): N-glycosylation site. Prosite id = PS00001
MDREQAKRKAEALVGQMTVEEAASQLRFDAPAIERLNIPAYNWWNEGLHGLARSGVATSFPQAIAMAAAFDPDMMERVGDVIATEARARYNTSSVRGDRGIYKGLTIWSPNVNIFRDPRWGRGHETYGEDPYLTSRLGVGFVKGLQGEGETRKVAACAKHFAVHSGPEDLRHRFNATVSEKDLYETYLPAFKALVREADVETVMGAYNRTNGEPCCGSKKLLRDILRDEWGFRGHVVSDCWAVKDFHENHKVTEGPEQSVKLALENGCDVNCGCTFQFVMSAYAKGLISEETIRTSAVRLFTTRYLLGMMEGSAFDRIGIEALEAKEHLSVAGEAAEKGCVLLKNNGLLPLDAGSIKKIGVIGPNANSRAALIGNYHGTSSRYVTVLEGIQDYLGDDVRVLYSEGCDISNDKVEPLAQDGDRLSEAQAVADASDVVVLVVGLNENLEGEEGDAGNQYVSGDKQDLLLPAPQRKLMQAVFASKKPTVIVLMAGSSIDLEEYGEKADAILLPWYPGARGGKTVADILFGRVSPSGKLPVTFYRNEDLEKIPAFTDYGMKNQTYRYLDFAPLYPFGYGLTYGDCAVETAEACKTGDTVRVRATVKNLSGVATQEVIQVYAQNEGSATAPRNPRLVGFKRISCPPQRSVTEEWEFKAELLDTVGADGRPVFEEHATLYVSLGQPDALTEKLTGHAAIRIGI

SEQ ID NO: 683 - DNA, 1983 bp, Unknown
  Obtained from environmental sample
atgaaatccataaagcacatcgctgcagcagcagcgctgggactcgccgtccttacggcttctgcccagacaggaaccctcaacctcagccttgccaacacaggcaagacagtgaatcccaagatgtacggcatcttcttcgaggacatcaacttcgcagcagacggaggtctctacgcggagatggtcaagaaccgctcgttcgaattccctaaccgcctccagggatggagagcatccggaaagttcgagatcatggaggacggtccgttcgagaagaacccccactacatccgcctcaactattcaggccattcagagaaatacacggctctcgagaacgacggctacttcggaatgggcatcaaagaaggcgaagactaccgcttcagcgtatgggcaagagctcctaagggaggagacggccagataaccgtcgagctatgcgacatagcatcaatggacgaggagcaggcagtggccagcgaggagatcgccatcagctcaagtgaatggaccaagtacacagtcattctcaagccttcgaagggagttgccaagtcgacactccgcatcttcctcgacggggcggtcacagttgacgtcgagcacgtatcgctcttccctgtcgacacatggatgggccacgagaacggcatgaggaaggacctcgcgcaggctctgtacgacctacatccaggagtgttcaggttccctggcggatgcatcgtcgagggagctgatctggctaccagatacaactggaagaattcagtcggtccggtggagaaccgtcccctcaacgagaacagatgggaatccaccttccgctacaggttcttctcagactaccaccagacctacggacttggattctacgagttcttccagctctgcgaggagctcggttcagaccctcttcctgtgctcagctgcggacttgcctgccagttccagaacgacgatccttcagcacaccagcctcttgacgagatccagtcgttcgtcgacgacgccctcgacctcatcgagttcgccaacggcagcaccgacaccaagtggggcaagctgagggcggacatgggccatccggctccgttcggcctgaagtatctcgccataggcaacgagcagtgggaccagatctacatcgactacctcactcctttcgtggagcagatcagggcaaagcatcctgagatccttcttgtcggaacatccggtccttacagcggaggcgagatgttcgacttcctctggccggagatgaagaagatcggtgcagaccttgtcgacgagcactactacagttccgagaaatggttcctcaacaacgctgacagatatgacagctacgagcgcaagggtccgaaggtattcgccggagagtatgcatgccatggcgtgggaaagaaatggaaccacttctacacctcgctcctcgaggcggccatcatgacaggtttcgaaagaaacgccgacatagtgcgccttgctacctacgcccctctcttcgcacactacgagggatggcagtggcgtcctgacatgatctggttcgacaacttccagaccgtgaagaccgcaagctactacgtacagcagatgtactcgacccacacgggcaccgacgtgcttgacatcaccatggacggaaagcctctggctggaaaggaaggccagcaggacctctatgccagcgctgtctacgactctgcgaagaagcaggtatatgtcaagatcgtcaacgtatccgacgaggcgcgcaagctcagcttcgaggtctcaggcctcaagaagaaagagtctgtctcatgcatcggctcgatcagcctccactgcgaggagatggacgtcgagaacacacgtgagaaccctgacctcatcgtccctgtatcctcattcaccgacggtatagatgaaaatggcacgatcgaaatcgcgccaaagacattcaagatctatattttcagcagaaactag

SEQ ID NO: 684 - protein, 660 aa, Unknown
  Obtained from environmental sample
  SIGNAL (1)...(22)
  DOMAIN (60)...(210): Carbohydrate binding domain
  DOMAIN (462)...(651): Alpha-L-arabinofuranosidase C-terminus
  SITE (28)...(31): N-glycosylation site. Prosite id = PS00001
  SITE (102)...(105): N-glycosylation site. Prosite id = PS00001
  SITE (352)...(355): N-glycosylation site. Prosite id = PS00001
  SITE (591)...(594): N-glycosylation site. Prosite id = PS00001
  SITE (651)...(654): N-glycosylation site. Prosite id = PS00001
MKSIKHIAAAAALGLAVLTASAQTGTLNLSLANTGKTVNPKMYGIFFEDINFAADGGLYAEMVKNRSFEFPNRLQGWRASGKFEIMEDGPFEKNPHYIRLNYSGHSEKYTALENDGYFGMGIKEGEDYRFSVWARAPKGGDGQITVELCDIASMDEEQAVASEEIAISSSEWTKYTVILKPSKGVAKSTLRIFLDGAVTVDVEHVSLFPVDTWMGHENGMRKDLAQALYDLHPGVFRFPGGCIVEGADLATRYNWKNSVGPVENRPLNENRWESTFRYRFFSDYHQTYGLGFYEFFQLCEELGSDPLPVLSCGLACQFQNDDPSAHQPLDEIQSFVDDALDLIEFANGSTDTKWGKLRADMGHPAPFGLKYLAIGNEQWDQIYIDYLTPFVEQIRAKHPEILLVGTSGPYSGGEMFDFLWPEMKKIGADLVDEHYYSSEKWFLNNADRYDSYERKGPKVFAGEYACHGVGKKWNHFYTSLLEAAIMTGFERNADIVRLATYAPLFAHYEGWQWRPDMIWFDNFQTVKTASYYVQQMYSTHTGTDVLDITMDGKPLAGKEGQQDLYASAVYDSAKKQVYVKIVNVSDEARKLSFEVSGLKKKESVSCIGSISLHCEEMDVENTRENPDLIVPVSSFTDGIDENGTIEIAPKTFKIYIFSRN

SEQ ID NO: 685 - DNA, 2637 bp, Unknown
  Obtained from environmental sample
atgactagtggacgaaacacatgtgtgtgtctgttgttgattgtgctggcgatcggtcttctgtcaaagccaccggcgagcgcgcaaaatgaggcgccttataaagccacgctgacgatccggttggaccaaccgggagcggtgatcaatcgcaacatctacggccagtttgcggagcatctcggacgtttgatctacgacgggctctgggttggtgaaggatcgtcgatcccgaacacgcgcggattgcgtaacgacgtcgttacggcgttaaaagaattgcatgtgcctgtgctgcgttggcccggcggctgttttgccgacgagtatcactggcgtgacggcattggaccacgcgacaagcgtccgcggcggccgaacgcgagttggggcggcgtcgattcgaatgcgtttggcacgcatgagttcatggagctgtgcgagatgttgggcgcagacgcttatatcaatggcaacgtcggcagcggcacgccgcaggagatgatggaatggatcgagtacatgacttccgattccgattcggatctcgccaacctgcgccgtcgcaatggccgcgacaagccgtggaaggtgccgtatttcgccgtcggcaatgagacgtggggctgtggtggaaatatgcggccggagttttacgccgacgtgtatcgccagtacgccacgttcatcaagaaccattcaggcaatcgcattcagaaactcgcgagcggtggttacgacaacaattacaactggaccgaggtgctgatggcgcaggcggcgaagcagatcgatggcctgtcgttgcactattacacgctgcccaccggcaactgggacaagaaaggatcggcgacggaattcggcgaaagcgagtggcacgcgacgctcgccaggacgttgcgcatcgaggagttcattcagaagcacagcgcgatcatggacaagcacgatccgcagaagcgcgtcggtttgatggttgacgagtggggcacgtggtacgaccgcgacgagggccgcgacatgggcgcgctttatcagcagaacacgttgcgcgatgcggttgcggccggtatcaatctcaatatctttcacaagtatgccgatcgcgtgcgcatggcgaacatcgcgcagatggtgaacgtgttgcaggcgatggtgttgacggacaaagagaaaatggtgctgacgccgacgtatcacgtttttcggatgtatcgcgtgcatcagggagcgacgctgatcccggtcgaggttagtgcgccgcagtacacgctgggtggtgcgtctgtgccgtcgttgagcgtgtcggcttcgcgtgacggtgaaggacgggtgcatctgtcgatcgtgaatctcgatccagcgcgggcggcggagatcgatgcgaacggaccgttcagcagtgtcaagggagaagtattgactgcgccggcggtgaatgcgctgaatactttcgatcacccggatagtgtcaagcccgtgtcttttaatggatataaattagaaggctctaaattaatcctgaatattccggcgaaatccgtggtggtgttggaacttggaccacagaaacaagcaacgctcaaagatgcattcaaaaacgatttcatgatcggcgcggcgctcaaccggcgacagttcttcgaagaagacgctcgcggcgcagagatcgtgcgcatgcatttcaactcgatcacgccggagaacgtgttgaagtgggggctggtccatcccgaaccgaacaagtacgacttcaccgctcccgatcgcttcgtcgaattcggcgagaagcacggcatgttcgtcgtcggacacacgctcgtctggcataaccaaacgccgcgctgggtttttgaagacgaaaagaaacagccgctcgatcgcgagacgttgctgaaacgaatgcgcgatcacatcttcaccgtcgtcggccgttacaagggacgcattaaaggctgggacgtagtcaacgaggcgctgaatcaggatggcacgatgcggcagtcgccgtggttcaagatcatcggcgaggattatctcgtcaaagcgtttgagtttgcccacgaggccgatccagccgccgagctttattacaacgactacgatctcgagctgccggcgaagcgcgcaggcgccgtcgaactgctgaagaaactgaaagccgcgggtgtgtcgcttgctggtgtgggattgcagaaccacagtctcatggagtggccgtcagccgcagatgtggatgcgacgatcgcggcgttcgcgaatctgggtttgaaggttcacatcacggaactcgacgtcgacgtgctgccgcgcacgacgaaacccggtgcggattacgcagtcgacgtgaaggtgacgccgcagttgaacccgtatctcgacggcttaccggaggcgcgacagtcggcgttggcgaggcgttatgcggagctgtttcacgtgtttagaaaacatcgcgacgcgatcgagcgtgtgacgttctggggagttgcggacggcgattcgtggttgaacaactggcccatccgcggcaggacaaactatccgctgctcttcgatcgttccggccaaccgaaaccggcgttagcgtcggtgatcgaaaccgctaattattcaacggaacgtcgacggtga

SEQ ID NO: 686 - protein, 878 aa, Unknown
  Obtained from environmental sample
  SIGNAL (1)...(28)
  DOMAIN (328)...(515): Alpha-L-arabinofuranosidase C-terminus
  DOMAIN (528)...(870): Glycosyl hydrolase family 10
  SITE (128)...(131): N-glycosylation site. Prosite id = PS00001
  SITE (208)...(211): N-glycosylation site. Prosite id = PS00001
  SITE (235)...(238): N-glycosylation site. Prosite id = PS00001
  SITE (254)...(257): N-glycosylation site. Prosite id = PS00001
  SITE (745)...(748): N-glycosylation site. Prosite id = PS00001
  SITE (768)...(778): Glycosyl hydrolases family 10 active site. Prosite id = PS00591
  SITE (884)...(887): N-glycosylation site. Prosite id = PS00001
MTSGRNTCVCLLLIVLAIGLLSKPPASAQNEAPYKATLTIRLDQPGAVINRNIYGQFAEHLGRLIYDGLWVGEGSSIPNTRGLRNDVVTALKELHVPVLRWPGGCFADEYHWRDGIGPRDKRPRRPNASWGGVDSNAFGTHEFMELCEMLGADAYINGNVGSGTPQEMMEWIEYMTSDSDSDLANLRRRNGRDKPWKVPYFAVGNETWGCGGNMRPEFYADVYRQYATFIKNHSGNRIQKLASGGYDNNYNWTEVLMAQAAKQIDGLSLHYYTLPTGNWDKKGSATEFGESEWHATLARTLRIEEFIQKHSAIMDKHDPQKRVGLMVDEWGTWYDRDEGRDMGALYQQNTLRDAVAAGINLNIFHKYADRVRMANIAQMVNVLQAMVLTDKEKMVLTPTYHVFRMYRVHQGATLIPVEVSAPQYTLGGASVPSLSVSASRDGEGRVHLSIVNLDPARAAEIDANGPFSSVKGEVLTAPAVNALNTFDHPDSVKPVSFNGYKLEGSKLILNIPAKSVVVLELGPQKQATLKDAFKNDFMIGAALNRRQFFEEDARGAEIVRMHFNSITPENVLKWGLVHPEPNKYDFTAPDRFVEFGEKHGMFVVGHTLVWHNQTPRWVFEDEKKQPLDRETLLKRMRDHIFTVVGRYKGRIKGWDVVNEALNQDGTMRQSPWFKIIGEDYLVKAFEFAHEADPAAELYYNDYDLELPAKRAGAVELLKKLKAAGVSLAGVGLQNHSLMEWPSAADVDATIAAFANLGLKVHITELDVDVLPRTTKPGADYAVDVKVTPQLNPYLDGLPEARQSALARRYAELFHVFRKHRDAIERVTFWGVADGDSWLNNWPIRGRTNYPLLFDRSGQPKPALASVIETANYSTERRR

SEQ ID NO: 687 - DNA, 843 bp, Cochliobolus heterostrophus ATCC 48331
atgcttcgcccagcttctctcttcgcacttggtgcccttctctttctttcacttctcgactctgtgtccgctgcaacagcaggctgtggcaaaacccccagactgaacagtggtgttcataccatcacagtcaacaacaagcagcgccgctacactctccgcgtgcctcaaaactatgacaacaagcgccaataccgcttcatctttggcctgcactggctcaacggtgacatgaacgcggtcgctagtggagctgctccctactacggcctcgctgctcttgccggtgagagcaccatctttgtggcccccgatggtctcaacaggggatggggcaaccagaatggagaggatattgccttccttgacgcagtcaggaagcagattgacgacgaattctgtgtcaacgagaagctccgcttctccctcggtttctcctacggcggcgccatgtccttcagtctggcttgcagcaaggcggctgacttccgaggcattgctgtcttgtctggtgccactctctctggatgtgccggtggcaacacccccattgcgttctacggtcaacacggtgtcaaggacagtgttctgcccatatcttccgggaaacagatccgtgaccgctttgtgcagctgaacggatgccagtccaagaacgcacccgacccatctcccaacagccgacagcgcgtcaagaccgtatacgatggatgcaggtacccaacccaatggacctcctttgatggagaccatgtcgcacttcccggagatgcaggaaacgatgttggtgctcagagcttcacacccaaagaagtctgggccttcttcagccagttcacctaa

SEQ ID NO: 688 - protein, 280 aa, Cochliobolus heterostrophus ATCC 48331
  SIGNAL (1)...(26)
  DOMAIN (21)...(235): Glycosyl hydrolase family 62
MLRPASLFALGALLFLSLLDSVSAATAGCGKTPRLNSGVHTITVNNKQRRYTLRVPQNYDNKRQYRFIFGLHWLNGDMNAVASGAAPYYGLAALAGESTIFVAPDGLNRGWGNQNGEDIAFLDAVRKQIDDEFCVNEKLRFSLGFSYGGAMSFSLACSKAADFRGIAVLSGATLSGCAGGNTPIAFYGQHGVKDSVLPISSGKQIRDRFVQLNGCQSKNAPDPSPNSRQRVKTVYDGCRYPTQWTSFDGDHVALPGDAGNDVGAQSFTPKEVWAFFSQFT

SEQ ID NO: 689 - DNA, 1350 bp, Cochliobolus heterostrophus ATCC 48331; identical to SEQ ID NO: 35

SEQ ID NO: 690 - protein, 449 aa, Cochliobolus heterostrophus ATCC 48331; identical to SEQ ID NO: 36
  SIGNAL (1)...(19)
  DOMAIN (1)...(86): Mating factor alpha precursor N-terminus
  DOMAIN (121)...(431): Glycosyl hydrolases family 6
  SITE (23)...(26): N-glycosylation site. Prosite id = PS00001
  SITE (57)...(60): N-glycosylation site. Prosite id = PS00001
  SITE (68)...(71): N-glycosylation site. Prosite id = PS00001
  SITE (96)...(99): N-glycosylation site. Prosite id = PS00001
  SITE (128)...(131): N-glycosylation site. Prosite id = PS00001
  SITE (231)...(240): Glycosyl hydrolases family 6 signature 2. Prosite id = PS00656
  SITE (274)...(277): N-glycosylation site. Prosite id = PS00001
  SITE (322)...(325): N-glycosylation site. Prosite id = PS00001
  SITE (337)...(340): N-glycosylation site. Prosite id = PS00001
  SITE (404)...(407): N-glycosylation site. Prosite id = PS00001

SEQ ID NO: 691 - DNA, 2643 bp, Thermobifida fusca YX  BAA-629
atgtccgtcactgaacctcctccccgccgacgcggccgtcacagccgggcgcgccgcttcctcacttccctgggagctaccgcggccctcaccgcgggcatgctgggcgtccccttggccacgggaaccgcccacgccgaaccggcgttcaactacgccgaagccctccagaagtcgatgttcttctacgaggcccaacgctccgggaaactcccggagaacaaccgggtctcctggcgcggcgactccgggctcaacgacggcgcggacgtgggactcgacctcaccggcggctggtacgacgccggcgaccacgtgaaattcggcttccccatggccttcaccgcgaccatgctcgcctggggcgccatcgaaagcccggaaggctacatccgctccggccagatgccctacctcaaggacaacctgcgctgggtcaacgactacttcatcaaagcccacccctcgcccaacgtgctgtacgtgcaggtcggcgacggcgacgccgaccacaagtggtggggtccggccgaagtcatgccgatggagcggcccagcttcaaagtggacccctcctgcccgggcagcgacgtcgcagccgaaaccgccgcggccatggccgcgtcctccatcgtgttcgccgacgacgaccctgcgtacgcggccaccctcgtgcagcacgccaagcagctctacacgttcgccgacacctaccgcggcgtgtactccgactgcgtgcccgccggagcgttctacaactcctggtcgggctaccaggacgagctcgtctggggcgcctactggctgtacaaggccaccggggacgactcctacttggcgaaggccgagtacgagtacgacttcctctccaccgagcagcagaccgacctccgcagctaccggtggaccatcgcctgggacgacaagtcctacggcacctacgtgctgctcgccaaggaaaccggcaagcaaaaatacatcgacgacgccaaccggtggctcgactactggacggtcggcgtcaacggccagcgcgtgccctactcccccggcgggatggctgtgctcgacacctggggagccctgcgctacgccgctaacaccgcgttcgtcgccctcgtctacgccaaggtgatcgacgaccccgtccgcaagcagcggtaccacgacttcgcggtgcggcagatcaactacgcgctcggcgacaacccgcggaactccagctacgtggtgggcttcggcaacaacccgccgcgcaacccccaccaccgcaccgcgcacgggtcgtggaccgacagcatcgcctcgcccgcggagaaccggcacgtcctctacggcgccctcgtcggcggtcccggctccccgaacgacgcctacaccgacgaccggcaggactacgtcgccaacgaagtcgccaccgactacaacgccggattctccagcgcgctggccatgctggtcgaagagtacggcggcaccccgctggcggacttcccgcccaccgaggagcccgacggaccggagatcttcgtggaagcccagatcaacacgccgggcaccacgttcaccgagatcaaagccatgatccgcaaccagtcgggctggccggcccggatgctggacaagggcaccttccggtactggttcaccctcgatgaaggcgtggaccccgcggacatcacggtgagctccgcctacaaccagtgcgccaccccggaggacgtccaccacgtctccggcgacctgtactacgtggagatcgactgcaccggggagaagatcttccccggcggccagtcggagcaccgccgcgaagtccagttccgcatcgccggcggccccggatgggacccctccaacgactggtccttccaaggcatcggcaacgaactcgcccccgccccgtacatcgtgctctacgacgacggtgtaccggtgtggggcaccgcccccgaggaaggggaagagcccggcggcggagaaggaccgggaggcggcgaagaacccggcgaggacgtgaccccgccgagcgcgcccggctcccccgcggtccgggacgtcacctccaccagcgccgtgctcacctggtccgcgtccagcgacaccggcggcagcggcgtagccgggtacgacgtcttcctccgcgccggcacaggccaggagcagaaggtgggatccaccacccggaccagcttcaccttgaccggtctagaacccgacaccacctacatcgcggctgtcgtggcccgggacaacgcgggcaacgtctcccagcggagtaccgtctccttcaccacgctggccgagaacggcggcgggcctgacgcctcctgcacggtgggctacagcaccaacgactgggactccggattcaccgcttcgatccggatcacctaccacggcacggccccgctctccagctgggagctctccttcaccttccccgctggccagcaggtcacccacgggtggaacgccacgtggcgccaggacggggccgccgtgaccgccacccccatgtcctggaacagctccctggcgcctggagccaccgtcgaggtcggcttcaacggctcctggagcggcagcaacacacctcccaccgatttcaccctcaacggcgagccctgcgccctcgcctaa

SEQ ID NO: 692 - protein, 880 aa, Thermobifida fusca YX  BAA-629
  SIGNAL (1)...(46)
  DOMAIN (51)...(484): Glycosyl hydrolase family 9
  DOMAIN (509)...(588): Cellulose binding domain
  DOMAIN (676)...(760): Fibronectin type III domain
  DOMAIN (778)...(877): Cellulose binding domain
  SITE (412)...(415): N-glycosylation site. Prosite id = PS00001
  SITE (414)...(430): Glycosyl hydrolases family 9 active sites signature 1. Prosite id = PS00592
  SITE (466)...(484): Glycosyl hydrolases family 9 active sites signature 2. Prosite id = PS00698
  SITE (539)...(542): N-glycosylation site. Prosite id = PS00001
  SITE (766)...(769): N-glycosylation site. Prosite id = PS00001
  SITE (837)...(840): N-glycosylation site. Prosite id = PS00001
  SITE (855)...(858): N-glycosylation site. Prosite id = PS00001
  SITE (870)...(873): N-glycosylation site. Prosite id = PS00001
MSVTEPPPRRRGRHSRARRFLTSLGATAALTAGMLGVPLATGTAHAEPAFNYAEALQKSMFFYEAQRSGKLPENNRVSWRGDSGLNDGADVGLDLTGGWYDAGDHVKFGFPMAFTATMLAWGAIESPEGYIRSGQMPYLKDNLRWVNDYFIKAHPSPNVLYVQVGDGDADHKWWGPAEVMPMERPSFKVDPSCPGSDVAAETAAAMAASSIVFADDDPAYAATLVQHAKQLYTFADTYRGVYSDCVPAGAFYNSWSGYQDELVWGAYWLYKATGDDSYLAKAEYEYDFLSTEQQTDLRSYRWTIAWDDKSYGTYVLLAKETGKQKYIDDANRWLDYWTVGVNGQRVPYSPGGMAVLDTWGALRYAANTAFVALVYAKVIDDPVRKQRYHDFAVRQINYALGDNPRNSSYVVGFGNNPPRNPHHRTAHGSWTDSIASPAENRHVLYGALVGGPGSPNDAYTDDRQDYVANEVATDYNAGFSSALAMLVEEYGGTPLADFPPTEEPDGPEIFVEAQINTPGTTFTEIKAMIRNQSGWPARMLDKGTFRYWFTLDEGVDPADITVSSAYNQCATPEDVHHVSGDLYYVEIDCTGEKIFPGGQSEHRREVQFRIAGGPGWDPSNDWSFQGIGNELAPAPYIVLYDDGVPVWGTAPEEGEEPGGGEGPGGGEEPGEDVTPPSAPGSPAVRDVTSTSAVLTWSASSDTGGSGVAGYDVFLRAGTGQEQKVGSTTRTSFTLTGLEPDTTYIAAVVARDNAGNVSQRSTVSFTTLAENGGGPDASCTVGYSTNDWDSGFTASIRITYHGTAPLSSWELSFTFPAGQQVTHGWNATWRQDGAAVTATPMSWNSSLAPGATVEVGFNGSWSGSNTPPTDFTLNGEPCALA

SEQ ID NO: 693 - DNA, 1404 bp, Unknown; identical to SEQ ID NO: 549
  Obtained from environmental sample

SEQ ID NO: 694 - protein, 467 aa, Unknown; identical to SEQ ID NO: 550
  Obtained from environmental sample
  DOMAIN (3)...(454): Glycosyl hydrolase family 1
  SITE (2)...(5): N-glycosylation site. Prosite id = PS00001
  SITE (11)...(25): Glycosyl hydrolases family 1 N-terminal signature. Prosite id = PS00653

SEQ ID NO: 695 - DNA, 975 bp, Unknown
  Obtained from environmental sample
atgaagaagccaagatatcttgtagaccatctatacacagccgacccttcggcccatgttttcaatggaaaattatacatctatccatcgcacgatgttgaatcaggaattcccgagaatgacaacggcgaccattttgatatgcgcgattaccacgtgttttcgatggacgatattgatgggcctgttactgatcatggtgttgctttggatgttaaaaatattccctggtcgggtcgtcagttatgggcacccgatgcagcctgcaaaaacggtaaatactatctttattttcccttaaaggataaaaacgacattttccgtattggcgttgctgtgagcgataagcccgaaggtccgtttattccacaggagaacccaattaaaggaagtttcagcatcgaccctgctgttttagaggacaatgatggtaaatactatatgtattttggcggactatggggcggtcagcttcaaagataccgcaacaataaagccatagagtgcggtcatgaacctgctgataacgaacctgctttgtgtgctaaagttgctgtgttaagcgatgacatgctggagtttggtgaagaaccccgcgatgtggttattctcgacgaaaaaggagaaccattgaaagccggcgaccacgatcgtcgttattttgaaggcccatggatgcacaaatacaaaggaaaatactacttctcctactccaccggcaatacacataaactttgctatgccgttggcgatagcccttatggccctttcacctataaaggagttattctaaccccggtggtaggttggactacacatcactctatatgcgagtttaaaggtaaatggtatctcttccaccacgacagtgttccttcaggaggcaaaacctggttaagaagcattaaagttgttgagttggaaatgaatgacgatggcactattgttaccatggaaggtggtggcaactggtag

SEQ ID NO: 696 - protein, 324 aa, Unknown
  Obtained from environmental sample
  DOMAIN (4)...(315): Glycosyl hydrolases family 43
MKKPRYLVDHLYTADPSAHVFNGKLYIYPSHDVESGIPENDNGDHFDMRDYHVFSMDDIDGPVTDHGVALDVKNIPWSGRQLWAPDAACKNGKYYLYFPLKDKNDIFRIGVAVSDKPEGPFIPQENPIKGSFSIDPAVLEDNDGKYYMYFGGLWGGQLQRYRNNKAIECGHEPADNEPALCAKVAVLSDDMLEFGEEPRDVVILDEKGEPLKAGDHDRRYFEGPWMHKYKGKYYFSYSTGNTHKLCYAVGDSPYGPFTYKGVILTPVVGWTTHHSICEFKGKWYLFHHDSVPSGGKTWLRSIKVVELEMNDDGTIVTMEGGGNW

SEQ ID NO: 697 - DNA, 972 bp, Unknown
  Obtained from environmental sample
atgaaaaaaccaagatacctggttaaggatttatacaccgctgatccttcggcgcacgtattcaacgggaagatttacatctacccctcacacgatgtagaatccggcattccggagaatgacctcggggatcatttcgacatgcgggattaccatgtattctccatggattcgatcgacggtgaggtgaccgaccacggggttgtcctggctgttaaggacatcccttgggcgggccgccagctctgggccccggatgccgccttcaaaaacggccaatattacctttatttcccgctgaaggataaaaatgatattttcagaataggtgtggcggtgagtgataagcccgaaggcccattcactcctcaaagtgatccgataaagggaagcttcagcattgatccggcggtattggacgacggtgacggaaacttttacatgtatttcgggggattgtggggaggacaacttcagcggtaccgcaacaacaaggccatagaatgcggtcacgaaccggccggtgatgaacccgctctgtgcgccagggtggcccgactgagagatgacatgctggaattcgccgaagaaccccgcgatgtggtcattttggatgaaaacggcgaaccactaagggctggcgatcacgacaggcgctactttgaagggccgtggatgcacaaatacaagggcaagtactatttctcctattcaaccggaaatacccactttctgtgttatgccacaggcgacagtccatatgggcctttcacctatcagggtgtgatcctcacaccggtgataggttggaccacccaccattcgattgtggaattccatgggaaatggtacctcttccaccacgacagtaagccatcggggggcaaaacctggcttcggagtataaaagtggttgagttggagtataatcccgacggaaccataaagactctggacggcctggctgactaa

SEQ ID NO: 698 - protein, 323 aa, Unknown
  Obtained from environmental sample
  DOMAIN (21)...(315): Glycosyl hydrolases family 43
MKKPRYLVKDLYTADPSAHVFNGKIYIYPSHDVESGIPENDLGDHFDMRDYHVFSMDSIDGEVTDHGVVLAVKDIPWAGRQLWAPDAAFKNGQYYLYFPLKDKNDIFRIGVAVSDKPEGPFTPQSDPIKGSFSIDPAVLDDGDGNFYMYFGGLWGGQLQRYRNNKAIECGHEPAGDEPALCARVARLRDDMLEFAEEPRDVVILDENGEPLRAGDHDRRYFEGPWMHKYKGKYYFSYSTGNTHFLCYATGDSPYGPFTYQGVILTPVIGWTTHHSIVEFHGKWYLFHHDSKPSGGKTWLRSIKVVELEYNPDGTIKTLDGLAD

SEQ ID NO: 699 - DNA, 2163 bp, Unknown
  Obtained from environmental sample
atgaaacatcacaactataacgcgcatcattcgccaatcggcgctttcggctcattcacgctcggttttcgtggtgctcagggcggcctcggactggagttaggcggcccggccaatcacaacatgtacatcggagtggaagacgagcagcgcaccttccattgccttcccttttttggggatgctgctgcaggggccgaggaagcactgcgctacgatgtggaaggcagccaatccagtgacgatccactggccggcgcctatgtcggacacccagaggatgcgccatcgctgcctccggccaagttgcgtgcgctggaccaaagcgccatctcacgggattttcaacttacgaccgacacctggacagcaccggatttctcactcacgatctattcgccggtacgcggcgtgcccgatccgacaacggctgcggaagacgaattgaaagccattcttgtgcccgctgtactctgcgagttgacggtggataactcgagtgggcagcagtctcggcgtgcgctctttggtttcaccgggaacgatccttattggggaacgcggcgccttgatgatgtagcgaatagtgcgttcgtgggggttggcgagggaaatcatctggccattgcgtcacgagatgaaggagtgacggcggcgctgggcttcaacatcaatggcgttatcaacgagactttgcctgagaattacgcctttggtctgggcaaatgcgcagttttgctctgcgaggtgcctgccggtgaaaagcgcacgttccatatcgccgtctgttttcatcggagcggcatcgccaccaccggtttgaagatgcgctattattacacgcgctttttccctgacatcgaaagcgtagccgcttatgcactggagcagttcgattctctcaaaagtgcagctctccaagacaatcaactagtggagaacgcgtcgctttcagaagaccagaaatggatgttctgccacgcggtgcgctcgtactatggctcaacggagttgctggagtataacgacaatccggtgtgggtggtcaacgaaggcgaatatcgtatgatgaacaccttcgacttgacggtggatcatctctactgggaactgcgcctgaatccctgggttgtgaaaaatcagctcgactggtttgtggatcgctactcgtatgaggacaaggtgcgctttcctggtgacaaaactgagtacccatgcggtctctccttcacgcacgatatgggcgtgacgaatgtgtggtcgcgccccggctattcgtcttatgagaagcagggactcaagggtgtcttttcgtatatgacgcacgagcaactcgtcaactggctctgctgcgccacggtgtatgtggaacagaccggtgaccaggagtggcttgaacaacggtggccgattttcaacaggtgctttgagagtttgctcaaccgcgatcaccccgatcctgaaaagcggcgcggcttaatgcaactcgattcgacccgttgcgccggtggtgcggagatcaccacttacgacagccttgatgtctcgctggggcagtcacgcaacaacacctatctgggtgggaaaatctgggcgagctatctggcactcgaaaaattgttccgcgagcgcggcgacgtggaaagagcgcaagtggcgcatcaacaggcgcatcgcacggcgcaaacgctgctggagaatgtcggcgagaatgggacgattcccgccgtactcgaaggcagcaatcagtcgagaatcattcccgtgattgaggggttgatcttcccctacttcaccgggcgcaaggatgtcctcagttccgatggcgacttcggcgagatgttttcggcactcaagcgccatcttgaagccgtgctaaaacccggtatctgtctgtttgaagatggtggctggaagttaagttcaacctctgataactcgtggctgagcaaaatctacctgtgccagttcgtcgcgcgccagatattgggccgtgaacgcgatgacattgacaagcgcgccgatgccgcgcacgtgggctggctgctcgatgagcgcaatgcctacttcgcgtggagtgaccagatgctggccggctttgcggaaggctccaagtactacccgcgcggtgtgaccagcgcattgtggttgctggaaggctga

SEQ ID NO: 700 - protein, 720 aa, Unknown
  Obtained from environmental sample
  DOMAIN (19)...(456): Glycosyl hydrolase family 52
  SITE (167)...(170): N-glycosylation site. Prosite id = PS00001
  SITE (197)...(200): N-glycosylation site. Prosite id = PS00001
  SITE (232)...(235): N-glycosylation site. Prosite id = PS00001
  SITE (318)...(321): N-glycosylation site. Prosite id = PS00001
  SITE (530)...(533): N-glycosylation site. Prosite id = PS00001
  SITE (579)...(582): N-glycosylation site. Prosite id = PS00001
  SITE (590)...(593): N-glycosylation site. Prosite id = PS00001
MKHHNYNAHHSPIGAFGSFTLGFRGAQGGLGLELGGPANHNMYIGVEDEQRTFHCLPFFGDAAAGAEEALRYDVEGSQSSDDPLAGAYVGHPEDAPSLPPAKLRALDQSAISRDFQLTTDTWTAPDFSLTIYSPVRGVPDPTTAAEDELKAILVPAVLCELTVDNSSGQQSRRALFGFTGNDPYWGTRRLDDVANSAFVGVGEGNHLAIASRDEGVTAALGFNINGVINETLPENYAFGLGKCAVLLCEVPAGEKRTFHIAVCFHRSGIATTGLKMRYYYTRFFPDIESVAAYALEQFDSLKSAALQDNQLVENASLSEDQKWMFCHAVRSYYGSTELLEYNDNPVWVVNEGEYRMMNTFDLTVDHLYWELRLNPWVVKNQLDWFVDRYSYEDKVRFPGDKTEYPCGLSFTHDMGVTNVWSRPGYSSYEKQGLKGVFSYMTHEQLVNWLCCATVYVEQTGDQEWLEQRWPIFNRCFESLLNRDHPDPEKRRGLMQLDSTRCAGGAEITTYDSLDVSLGQSRNNTYLGGKIWASYLALEKLFRERGDVERAQVAHQQAHRTAQTLLENVGENGTIPAVLEGSNQSRIIPVIEGLIFPYFTGRKDVLSSDGDFGEMFSALKRHLEAVLKPGICLFEDGGWKLSSTSDNSWLSKIYLCQFVARQILGRERDDIDKRADAAHVGWLLDERNAYFAWSDQMLAGFAEGSKYYPRGVTSALWLLEG

SEQ ID NO: 701 - protein, 36 aa, Artificial sequence
  polypeptide linker from SEQ ID NO:360
SGGSSTGGSSTTTASGTTTTKASSTSTSSTSTGTGV

SEQ ID NO: 702 - protein, 22 aa, Artificial sequence
  polypeptide linker from SEQ ID NO:371
SGTGGNNPDPEEPEEPEEPVGT

SEQ ID NO: 703 - protein, 49 aa, Artificial sequence
  polypeptide linker from SEQ ID NO:606
NSGSTGGGNGSGSTTTTKGSTTTTKAPTTTTTTSKATTTTAASGGNGGG

SEQ ID NO: 704 - protein, 24 aa, Artificial sequence
  polypeptide linker from Thermobifida fusca GH6 (Genbank YP_289135)
TNPNPNPNPTPTPTPTPTPPPGSS

SEQ ID NO: 705 - protein, 46 aa, Artificial sequence
  polpeptide linker from Saccharophagus degradans (Genbank YP_527744)
SGSSSSSSSSSSSSSSSSSSSSSTSSSSSSSSSTSSSSSSSGSSGT

SEQ ID NO: 706 - protein, 36 aa, Artificial sequence
  polypeptide linker from Xylella fastidiosa (GenbankNP_780034.1)
GGGASGGSGGGAGASSGSGAGGGSSGGAGTGSGSGA

SEQ ID NO: 707 - DNA, 1215 bp, Unknown
  Fungal DNA
ttatgaagtttcagagcactctgcttcttgccgccgcggctggttccgcgttggctgtgcctcatggtcctggacataagaagagggcgtctgtgtttgaatgtaagatctccttgccttgctgtcgctaagctgacggcatagggttcggatcgaatgagtctggtgctgagtttgggaccaatattcctggggtttgggtatgtatcatcgccagagtataggcgtatgctgatgtcgcagggaaccgactacatcttccccgacccctcggccatctctacgttgattgacaaggggatgaacttcttccgcgtccagttcatgatggagaggttgctgcccgactcgatgactggctcatatgatgaggagtatctggccaatttgacgacagtaagatgactccagcctgtgttgagtagtgctgacgagttaggtgataaaagcggtaacggacggaggcgctcatgcccttgttgaccctcataactatggcagatagtaagtacgcagtcccagtaggtaatactggctaacaaaacagcaacggcgagatcatctccagcacgtctgatttccagaccttctgggaaaatctggccggccagtacaaagataacgacctggtcatgtttgacactagtaagtacccacaatcccatcaaggatcatgctgacaaggcagacaacgaatatcacgacatggatcaggatctcgtgctgaacctcaaccaagcagccattaacggcatccgcgccgcaggtgcgaccagccagtacatcttcgtcgaaggcaactcctggaccggagcctggacgtgggtcgacgtcaatgacaacatgaagaatttgaccgaccccgaagacaagatcgtctatgaaatgcatcagtacctagactccgacggttccggcacctcggagacctgcgtgtccgagaccatcggaaaagagcgggtcactgaagctacacagtggctgaaggacaataagaaggtcggcttcataggcgaatatgccgggggttccaatgatgtatgtcggagtgccgtgtcggggatgctggagtacatggcgaataacaccgacgtatggaagggtgcgtcgtggtgggcagccgggccatggtggggagactacattttcagcctggagcccccagatggaactgcgtacacgggtatgctggatatcctggaggcgtatctttga

SEQ ID NO: 708 - DNA, 1475 bp, Unknown
  Fungal DNA
atgaagactctctcccttgtagctgtcctgctcgttcaagcctggactgcgagtagcagtccgagggcgaagcggtcttcgggctttcaatgtacctcttcttcctctactaccttttctgaagatacatattgataagtgagcagggtttggtagcaatgagtccggcgctgaattcggctccgggaatatccccggtactttgggcacggattacatctggcctgatgcgacggccatcgagacgctgcatagtgcagggatgaatatcttccgcgtgccgtttctcatggagcggttggtgccgaatgagttgactggtgcggcggatgcgacctatatggctgatttgaaggctgtaagctcccctactgggtgtaagatgcgctgatgttgatgataatgggggtgtggtgtagacggtgcaaaccattacagatctgggtgcttatgcggtggtggatccgcataattttgggagatagtacgtctttccctcctgtactctccatcctgtactctccttcggtatggaactaatgtgatatgctatccagctacggcagcatcatcacctcgaccagcgacttcgcagccttctggaccaccgtagccagcgagttcaccgacaatgaccgggtcatcttcgataccagtacctaccctaccttccccaatcttcggcaacaaatactaatagcgagatagacaacgagtttcacgacgaagaccaaaccctcgtcctgaacctcaaccaggctgccatcacggcgatccgcgccaccggcgccaccacgcaatacatcttcgtcgaaggcaactcctacacgggcgcctggacctggaccaccaccaacacgaacctcgtcaacctgaccgaccccaacgaccatctcatctacgaaatgcaccagtacctggacagcgatggctccgggacgagttcgacgtgcgtcagctcgacgatcggtgcggagcgcattgctgatgccacgagctggttgagggagaatgggaagcaggcggtgttgggagagttcgcgggcggcgcgaacagtgtatgtgaggaggcggttacgggcatgttggatgcgatggtcgatgcgagtgatgtttggttgggaggtatgtggtggtctgctggaccgtggtggggggattatatcttttcgttggagccggatgatggcattgcgtatgagtattatttgagcgtgttggaggggtatactcctggttcatcctcttctgggtcttctactacgagtgcagtgacgagtgccagtagtacgtctgctgctgggagtgctactacgagcaaggtgactactaccactgctgctgctactgctacatcgacggctgtggctgcgcattatgcgcagtgtggtgggcagggatggactggggcgacgacttgtgcggatggatatacctgtacggtggagaatgcgtggtattcgcagtgtttgtag

SEQ ID NO: 709 - DNA, 1247 bp, Unknown
  Fungal DNA
ttatgaagtccctcttcgctctcagcctcttcgccggcctttcggtcgctcaaaacgcagcatgggcccaatgcggtggaaacggctggactggctcaaagacctgcgtctctggctacaagtgcaccgtcgttaatgagtggtacagccagtgtatccccggtactgctgaggaacctactaccaccctcaagactactactggtggtggtagcacacctactggtacacctggaaatggaaagtttctctgggttggtactaatgaggctggtggtgagtttggtgagggcagtttgcctggaacttggggaaaacactttatcttccctgatcccgctgccgttgatgtaagtcaaacactggaatggcgagaacatgactgacatgatatagaccctcatctctcagggctacaacgccttccgcgttcaactccgcatggaacgcacaaaccctagctccatgaccggaccctttgacaccgcttacctcaagaacctcaccacaatcgtggaccacatcaccggcaagggcgccaacgtcattctcgaccctcacaactacggccgctactttgacaagatcatcacctcaacctctgacttccagacctggtggaagaactttgctacccagttcaagagcaacagcaaagtcatctttgacactaacaatgagtacaacaccatggatcagactcttgttctgaacttgaaccaggctgctatcaacggtattcgtgctgctggcgctacccagactatctttgttgagggtaaccagtggtccggtgcttggtcttggcccgatgtcaatgacaacatgaaggtgtgtactcctcctctttctccaatgactcccgtagctaataccaccaggctctcaccgaccctcttgacaagatcgtgtacgaaatgcaccagtacctcgactctgacagctccggtacttcacctaactgtgtctccaccaccattggagtcgagcgcgtcaaggctgctactgagtggttgaggaagaacaagaagattggcatgatcggtgaactcgccggcggtcctaacgacacctgcaagactgctgtcaagaatatgctggactatcttaaggagaactctgatgtttggaagggtgttacctggtgggctgctggtccttggtgggctgactacatgttcagctttgagcctcccagcggtactggttatcagtactacaactcccttctcaagacttatatctaa

SEQ ID NO: 710 - DNA, 1089 bp, Unknown
  Fungal DNA
atgcttcttcagaatctgttcgccgcggcgactctggccgcagctgcgtttgcagctccatcggagaagcgccaggagaggaaattgaaatggtttggcatcaacgagtctggcgcagagttcggtgagaagaacttcaccggcgtgtatggcagggagtacatctggtacgacttcaagaccattgaccagttcattgggcagggcatgaacatgttccgtctgaacttccgtacgtcacagaaatccccatctccaacctcaaatacaatgatactaactcactctcagtcatggagcgtcttacccccaacaagcttaccggcccattcgatcgcctttatctcggcaacctcaccgagcaagtaaaatatatcaccagcaaaggcgcctacgcaatgatccaaccgcacaactacggccgcttctacggtgaaatcatcaccgacactgccggcttcaagacctggtggcaaaacgtcgcggctcaatacaaagacaataaccttgtcgtcttcgacactaacaacgaataccacgacatggaccaacaactcgtctttaacctcaaccaagcctcaatcgacggcatccgcgcagcaggcgctaagcaatacatcacacccgaaggcaattcatggtcgggagcctggacatgggtatcatccggcaacggcgcctcacttgtaaacctcaaagaccccgagaacaaactcatctaccaaatgcaccaatacctcgacagcgacggcagcggctcccacgaagaatgcgtctcagccaccattttccgcgagcgcctcatcgccgcaacaaagtggctcaaagacaacaagaagcagggtgttattggcgagtttgcggcgggcaacaatgcccagtgcaagtcagctgttaaggatggacttaagtatctgcaggagaataaggatgtttggtggggagctatttggtgggctgcgggcccttggtgggcgacatatatgtatagtatggagccaccaaatggcattgcttggacggcgtttctgcctgagattaagagttatttcatctaggctagtgcgttcgtgtcgatgttttcgttga

SEQ ID NO: 711 - DNA, 1293 bp, Unknown
  Fungal DNA
atgaagcttctcaccgtcgcagcccttaccggcggcgcccttgcccagtccggcgcctggggccagtgtggtggccagggatggagcggcgcaaccacctgtgttgctgggtacacttgcaccttttcgaacccgtggtactctcagtgcctccccggctctgctcctcctccccctgcctcgacctccagcgccaggccggccacgacctcgtcggccgcgacgaccctgcagacatcgacacgcaccaccacctccaccggcaccactccgaccaccgctccgggagccttcgagtggtacggcgtcaacgagtccggcggcgagtttggcgagggtaccctgcccggccaatggggcaagcacttcatattccccgacccgacggccgtctcggtgagtacaccacttgggcctgcgtcaacatccttcatggctgacttctccctcagactctccgccgtgatggctacaatacgttccgtgtgcaattcaagatggagcgtctcacccagaccagcctgacaggctcctttgacgcggcgtacctcaagaacctgaccgactcggtcaaccacatcaccaacagcggcggcatcgcggtcctcgacccccacaactacggccgcttcttcggcaacgtcatcaccaacacggccgacttccgcacctggtggcgcaacgtggccacgcagttcgtgtccaacccccgcgttgtcttcgacaccaacaacgagtaccacaccatggaccagaccctcgttctccagctcaaccaggccgccattgacggtatccgtgccgcgggtgccacccagaccatcttcgtcgagggtaaccagtggtccggcgcctggagctggcccgacgtcaacgacaacatgaagaacctcgtcgatcccctcaacaagatcgtgtaccagatgcaccagtacctcgactcggactcgtccggcaccagcgtcaactgcgtctcgggcaccatcggccgtgagcgcctcatcgccgccaccaactggctgcgcgcgaacggcaaggtcggcatcctcggcgagttcgctggtggcgccaaccctacctgccgtaccgccatcaccggccttctcgaccacctgtccgccaacaaggatgtctggaggggcttcctgtggtgggccgcgggcccctggtgggacacttacatgtactccttcgagcctcccagtggcactggctacgtcaactacaactcgctgctcaagcagtacattccttaagtggatgttgctctttgagccgtttggcttctcatga

SEQ ID NO: 712 - DNA, 1189 bp, Unknown
  Fungal DNA
tgggcccaatgcggtggaaacggctggactggctcaaagacctgcgtctctggctacaagtgcaccgtcgttaatgagtggtacagccagtgtatccccggtactgctgaggaacctactaccaccctcaagactactactggtggtggtagcacacctactggtacacctggaaatggaaagtttctctgggttggtactaatgaggctggtggtgagtttggtgagggcagtttgcctggaacttggggaaaacactttatcttccctgatcccgctgccgttgatgtaagtcaaacactggaatggcgagaacatgactgacatgatatagaccctcatctctcagggctacaacgccttccgcgttcaactccgcatggaacgcacaaaccctagctccatgaccggaccctttgacaccgcttacctcaagaacctcaccacaatcgtggaccacatcaccggcaagggcgccaacgtcattctcgaccctcacaactacggccgctactttgacaagatcatcacttcaacctctgacttccagacctggtggaagaactttgctacccagttcaagagcaacagcaaagtcatcttcgacactaacaatgagtacaacaccatggatcagactcttgttctgaacttgaaccaggctgctatcaacggtattcgtgctgctggcgctacccagactatttttgttgagggtaaccagtggtccggtgcttggtcttggcccgatgtcaacgacaacatgaaggtgtgtactccccctctttctccaatgactcccgtagctaataccaccaggctctcaccgaccctcttgacaagatcgtgtacgaaatgcaccagtacctcgactctgacagctccggtacttcacctaactgtgtctccaccaccattggagtcgagcgcgtcaaggctgctactgagtggttgaggaagaacaagaagattggcatgatcggtgaactcgccggcggtcctaacgacacctgcaagactgctgtcaagaatatgctggactatcttaaggagaactctgatgtttggaagggtgttacctggtgggctgctggtccttggtgggctgactacatgttcagctttgagcctcccagcggtactggttatcagtactacaactctcttctcaagacttatatctaagtag

SEQ ID NO: 713 - DNA, 1255 bp, Unknown
  Fungal DNA
atgcgcaaccttcttgctctcttcgccctcgccggcccagctctcgcccagagcggcgcttggggacaatgcggcggcaaggggtggactggcgccacgacctgcgtgagcggctacacttgcacgtaccaaaacgactactatagccagtgtctggccggctcggacaagtcttctactaccttgtcgactgtgaccaagtcggcgacttcctcgtcttcgaccaaggcttctgctacggtgaccaagacttctgccacggcgacagccactggagggtcgtccactagtcaatggtggttcggcgttaacgaggccggtggtgagtttggagagggaactctgcctggcacctggggcgtcaactacattttccccgatacttcggtcatcgatgtaagtgtctctcctctcaacgatagtaaaccgtgctcaactcacatgcgtctagactttgatcggccaagggtacaacacgttccgcgtcggcttccgcatggagcggctcaccaccagctccctgacgggctccctcaacgaggcctatctcaagaacctcaccgccgtggtcaaccacatcaccgacaagggcgcctgggccgtcctggacccgcacaactacggccgctactttggcaacatcatcaccgacacggccgccttccagacgtggtggaagaacgtcgcgacgcagtttaagagcaacggccacgtcatcttcgacaccaacaacgagtacaacggcatggaccagacgctcgtcctcaacctcaaccaggccgccatcgacggcatccgcgccgccggggccaccagccagtacatctttgtcgagggcaaccagtggtcgggcgcgtggtcgtggaccgacgtcaacaccaacatgaaggcgctcaccgacacgcaggacaagatcgtctacgagatgcaccagtacctcgactcggacagctcgggcacgtcgtcgacttgtgtttcgacgacgattggcgtcgagcgcgtgaccaaggcgaccgagtggctgcgggcgaacggcaaggtcggcatcattggcgagtttgcgggcggcgcgaacacgcagtgccagacggctgtcaagggcttgttggactatctcaaggcgaacgacgatgtgtggatgggcgctctgtggtgggctggcggtccgtggtggagtgactacatcttcagctttgagccgccgagcggaactgggtactcgtactacaactctctcctgaagacgtatgcttga

SEQ ID NO: 714 - DNA, 1021 bp, Unknown
  Fungal DNA
atgcgatccgcactccttgtcgttgccggtgcgtctctggcattgtctgcatgcgcggacttcttgttcaccggctccaatgaatccggtgccgagtttggagagggcaatctccctggtactctcggcacggactacatctttccggaaaccgatgccattgatgtaagtgagtcgagagtcaagtcgatacaagctgaccaaatagacactccttgatactgggatgaacactttccgcatcccattccgaatggagcgtctcgccccggactcaatgacagaggccctcaattcgacctacctcagcggcctcaagacggtcgtcaaccacattaccggccagggcgcctatgctgtactcgaccctcacaattatggtcgatacgccggcagcatcatcaccgacacagacgcctttgctagcttctggaaatcggttgctaccgagtttgtcgacaatgagctggtcattttcgacacgaataacgaataccacgacatggaaaactcgctggtggctgagttgaaccaggctgccattactgctatccgcaatgccggtgccacgtctcagtacatctttgtcgagggcaacgcgtattccggagcgtggacctgggtttccagcggcaacggtgactctctcgcagacttgaccgacccccaggataagatcatctacgagatgcaccagtacctcgactctgatggatcgggcacgtccgaaacttgcgtcaataccaccatcggtgcggagcgtctcaaggcggccactgcttggctcaaggagaatggcaagctcggcatcctgggcgagactgccggtgcggctaacgaggtgtgcaagactgccatccagggtgagcttcagtatctcaaggacaactcggacgtgtggactggctggttgtggtggtctgctggcccctggtggggtgactatatgttcagcatggagcctcccagtggtactgcctacacctactatcttgatacgatccaagagttcattgagtag

SEQ ID NO: 715 - DNA, 1544 bp, Unknown
  Fungal DNA
atgaagtcttccgtgctcgccggcattttcgccaccggcgccgccgcccagagcggtgcttggggccagtgtggtggcaacggctggtcgggcgccacgtcctgcatctcgggctaccgctgcgtgtaccagaacgactggtacagccagtgcttgcctggtgccgacacgaccaccgccaaggcgacgacgacgacgacgacttccaagctgaccaccaccacgccgtcgaccaccctcaagacctcgactaccagcaagacctcgaccacctcgtcggcgcctgccaccagctcctcggcttcctccagcaagaagttcaagtggttcggtatcaaccagtcctgcgccgagttcggccagggcacctaccccggcacatggggcaagcacttcaccttcccctcgacgtcgtcgatccaggtacggcagaaataggtcgtggcaattcaacgtgtgtcgttgtactgacagatgccaagactcacatcaatgacggcttcaacgccttccgcgtggccttcgccatggagcggctggtgcccacccagctgacgggctcgttcgacgccgcctacctcaagaacctgaccgatacggtcaacttcattaccaacgccggctcgtatgccatcctggacccccacaacttcggccgctactacggcaacatcatcaccgacaaggccgcgttcggcagcttctggaccaaggtcgccacccagttcgcgtccaactcgcgcgtcgtcttcgataccaacaacgagtaccacgatatggaccagacgctcgtcttcgacctcaaccaggccgccatcaacgccatccgcgccgcgggtgccacctcgcagtatatcttcgtcgagggcaactcgtactcgggcgcctggacctggacccaagtcaacaccaacctgggcggcctgacagacccgcagggcaagatcgtctacgagatgcaccagtacctcgactcggacgggtcgggcaccagcgccacctgcgtcagctccgagatcggcctgcagcgcgtccaggacgcgaccaactggctgcgcgccaacggcaaggtcggcttcctcggcgagttcgccggcggcgccaactcggtctgccagaccgccgtcaccggcctgctcgaccacctcaaggccaacgccgacgtgtggacgggcgcgctctggtgggctggcggcccgtggtggggcgattacatcttcagcttgtgcgtgtttcctgtcctggcagtactatccatgaaaacagtggctgacatgtctttttcctgtctagcgagcctccttctggcacgggctacacctactacaactcgcttctcaagaagtacgttgtctaagcagcatcgaaagatgatgctggaccccgggagatgggttgctgagcgaggagcggccggttgctgctgggcaagccctcacattccaatccgcctcagatcacaactcaggtccaggtggcagatatggcggcgtgttacgactacgactgcttggttcagtgtatatattgttcattactgctga

SEQ ID NO: 716 - DNA, 1403 bp, Unknown
  Fungal DNA
atgaagttcctcaacatcattctcggtgctgccgctgccggttcggccctggcggcgccagcctgtgatgccacggctcccaaggacaagcgggcgagcaagttcaagtttgtcggcgtcaaccagtcgggcgccgagtttggcaaaggcatgctgcctggccagctcggtaaagactatacctggccggtcaagtcgacgatcgatgtgagtcgtcattgccggacgagaacttgggggatggagctaaccggttggcagactctcgtcggcaagggaatgaacacgttccgcgtccccatcatgatgtatggatccagtccgcatgaccgtgtctcaagagcaggagatcgctgacaactgcagggagcgcctcatccccaacaagatgaccggaagcatcgacgccgcctactctcaggggctcaccgatgtacgttgcccacatagcttttgtgtagacgaccaaagctgactgctcagatcatctcgtacatcaccggcaagggcgcctacgcggttctcgacccccacaactttggttggagcctcttcccttcttggaagcgtttggagttgctgacccgtgcctaggccggtactacgaacaaatcatcaccgacgttgatggtttcaaggcctggtggacgaccacggccaagctctttgccagcaacagcaaggtcatcttcgacaccaacaacgagtaccacgacatggacaactcgctcgtgttccggctcaaccaggcggccatcgacggtatccgggccgcgggcgccacgtcgcagctgattttcatcgagggcaactcctggagcggcgcgtggacttgggtcagtcttccccgtttcttaaaaaaaataaaagaaaaagcaaccgagtctaatgtagatactgtgcgatgacaggtctcctccggcaacggcgcctcgctgctcaacctccaggaccccgcgggcgcggacaagctcgtgtacgagatgcaccagtacctcgactcggacgggtccggcacgtctgaggcgtgcgtgtcgagcaccatcgggcaggagcgcctgcgcgaggcgacggcgtggctcaaggccaacggcaagaaggccatcctgggcgagacggcgggcggcgccaacgcgcagtgcatcgcggcgctgacgggcatgctgggttacatggccaacaacgccgacgtgtggacgggctggctgtggtggggcggcggcccgtggtgggggacttatatgtactcgatgtgagtggtggttttgttgctccagttcatggtgtcgagtcatgtttctgggttggtgtttcatgatgtgctaactgttgaatgttccagggagccgccgagcggtgctgggtatcaacaagtcctgccgagcttgacgccgtacttttga

SEQ ID NO: 717 - DNA, 1342 bp, Unknown
  Fungal DNA
atgaagacttccgtcctcgccggcatcttcgccacgggcgccgctgcccagggcgggccttgggcccagtgtggtggtaacaacttctccgggcccaccacttgcgtgtctggctacacctgtgtgtaccagaacgactggtacagccagtgcctgcccggtgcggctgctccgacgacgaccactgccaagacgtcgacgaccaccaaggccacgacgaccaccacgtcgaccacgctgaagacatcaaccgtctccagcacgacctcgtccgcccccgccgccagcagctcggctgctaccaagggcaagctgaagtggtttggcatcaaccagtcctgcgccgagttcggccagggcacctaccccggcatttggggcaagcacttcaccttcccctcgacgtcgtcgatccaggtgcgatagagaaaccgacaaaagctttatgttgcatttactaaccaatggtagactcacatcaacgacggatacaacagcttccgcgtggccttcgccatggagcgcctgatccccaaccagctgacgggctcgtttgacgccgactacctcaagaacctgaccgagacggtcgacttcattaccaacaagggcgcgtatgctatcctagacccccacaactttggccggtactacggcaacatcatcaccgacaaggccgccttcggcagcttctggagcaaggtcgccacccagtacgcgtccaactcgcgcgtcatcttcgacaccaacaacgagtaccatgacatggaccagaacctcgtcttcgacctcaaccaggccgccatcaacgccatccgtgccgcgggcgccacctcgcagtacatcttcgtcgagggcaactcgtactcgggcgcgtggacctggaacacgaccaacaccaacctcggcgccctgaccgacccccagaacaagatcgtctacgagatgcaccagtacctcgacagcgacggctccggcaccagcgccacctgcgtcagcaccgagatcggtgtccagcgcgtcattggtgccaccaactggctccgcgccaacggcaaggttggcttcctcggcgagttcgccggcggtgccaactcggtctgccagactgccgtcaccggtctccttgagcacctcaaggccaacagcgacgtctggcagggtgccctctggtgggctggcggcccgtggtggggcgactacatctacagcttgtgagtttcgtcgtttctgtccgttggagaaaacagtggctgactctgtgtttagcgagcccccctccggcacgggctatacttactacaactctctcctgaagaagtatgttgcctaaaagggcgaa

SEQ ID NO: 718 - DNA, 1110 bp, Unknown
  Obtained from environmental sample
atgaaacgtcctctagtcaatctcctgacaaccgcctgcctcctcgttgccgcaaatgctgcagaacccaccctccgcgaagcctacgaaaagcactttgccgtgggtgtcgcactcaataccgctcaagtgactggtcgaaacaaagccgcaggcgaactcgccgcgaagcagttcaattccatcaccgctgagaatgacatgaagtggcaatcgcttcatccagagctcgatacctaccgctttgaatcggccgatgcctatatcgactttgccaaaaagaatgagatggaagtcataggccacactctcgtctggcacagccagacccctcagtgggtgttccaaggcgacgatggcaaacccgcgacacgggaagaacttctcaagcggatgcgcgatcacattcacaaggtcgccggccgatacaagggtaaggtcaagggctgggacgtcgtcaatgaggcgctctccgacggaggtcaggacattctacgcgaatctccgtggcggcgaatcatcggagacgatttcatcgatcacgctttccgctacgcccgcgaagccgacccaaaggcagaactttactacaacgactacaacctcgaaatccctcgcaaacgcgagaactgcatcaagctcgtcaagggcatgcttgagcgcggcgtccccatcgacggcattggaacgcaatcccattttcagcttggcttcccatcgctggaagatgtcgagaccacgattgaagagtttggaaaactcggccttaaggtcatgattaccgaactcgatgtggatgtcctccctcgcaataacccaggcgtcgccgacatcagtcagcgcgagcaaggtagcaatccctacactgagggcctgcccgaggatgttcaaaagcagcttacgaaacgctacgaagacatcttcaagatctacctaaagcaccagaaaacggtcacccgcgtgaccttctggggcctcgatgatggtcaatcatggttgaatggctttcctgttagaggccgcaccaatcacccgctacttttcgatcgtgaactcaaaccgaagcccgttcttccagtcttgatagagctcggcaagaagaagcgataa

SEQ ID NO: 719 - protein, 369 aa, Unknown
  Obtained from environmental sample
  SIGNAL (1)...(20)
  DOMAIN (24)...(365): Glycosyl hydrolase family 10
MKRPLVNLLTTACLLVAANAAEPTLREAYEKHFAVGVALNTAQVTGRNKAAGELAAKQFNSITAENDMKWQSLHPELDTYRFESADAYIDFAKKNEMEVIGHTLVWHSQTPQWVFQGDDGKPATREELLKRMRDHIHKVAGRYKGKVKGWDVVNEALSDGGQDILRESPWRRIIGDDFIDHAFRYAREADPKAELYYNDYNLEIPRKRENCIKLVKGMLERGVPIDGIGTQSHFQLGFPSLEDVETTIEEFGKLGLKVMITELDVDVLPRNNPGVADISQREQGSNPYTEGLPEDVQKQLTKRYEDIFKIYLKHQKTVTRVTFWGLDDGQSWLNGFPVRGRTNHPLLFDRELKPKPVLPVLIELGKKKR

SEQ ID NO: 720 - DNA, 1299 bp, Cochliobolus heterostrophus ATCC 48331
gccagcatccgaagagtagctaagggcgttgcaaccgttgacctttccaagacttccggccaggcaaaattccttgcttctggatggatctacggatttcccgacaacggaacagcagcagatacttcgattcccgcgaattacattacggacgtcaaattcggtgctagccgagctggcggtgctcaaacgtcttcccgtggctgggtcgatggttaccagagctacattccgcgcttcgagtccaccctttctaactaccgtaccactcggaaatacaatggcgagtttatactcctcgtccacgatctatggggagcagatggcagcagcatcccttacttccctggtgataatggtaactggaccgaaaccgacgctttcttgacccagctcgtcaaagacatcaaagccaacaacatgctcgacggccttatcctcgacctctggaatgaacctgatattgatatattctgggctcgtacttggcctcaataccttgattactacgtccacgcccacaacttcttcaaaaaaaaccttccttcaactatcagaagtggcccttccatggccagctcacctagtactaactccgaaaattggcaaacctggctaagcaccatagcaagcaaagacgccaccccagatatttactcttggcaccagatcggtaactcgtcccgccaacctgacgccacaatccctgactttaacaccctccgttcctcgaaaaacctgcctgaacgccctatcgacattaacgagtatgcagcaaaagaagagcaaacccccggctgctccgtgtactacattgcccaactcgagcgtcacaacttgcgtggtctacgtgcaaactggggatctggaacgggccttcacgattcgctcgctaatctggtctttaatcagagtggcgctgggtatcttccgaatggagagtggcagttgtacaagtattacgccgggatgacgggagagaggcttgcaaccaaggcggctgatgatagtctgtttgacgtattcgcgaccaaatctgccgacgggctggtgaaggttatcgcagggacgcgcattgtgaatggccagtacgatattcagcttagtggattaaagggcgcgtcggttagtgtcgctacctatcgttttgactgggcggggcctatgggcgagataatggcgcccgtggcgttgggtactagcacagtgaatattagtagtgggatgattactatctcagttgatccggcgactaacgcgaccgcgtatgcatatgagatttctgacgtgaaggagtga

SEQ ID NO: 721 - protein, 432 aa, Cochliobolus heterostrophus ATCC 48331
  SITE (36)...(39): N-glycosylation site. Prosite id = PS00001
  SITE (122)...(125): N-glycosylation site. Prosite id = PS00001
  SITE (147)...(156): Glycosyl hydrolases family 5 signature. Prosite id = PS00659
  SITE (229)...(232): N-glycosylation site. Prosite id = PS00001
  SITE (307)...(310): N-glycosylation site. Prosite id = PS00001
  SITE (410)...(413): N-glycosylation site. Prosite id = PS00001
  SITE (425)...(428): N-glycosylation site. Prosite id = PS00001
ASIRRVAKGVATVDLSKTSGQAKFLASGWIYGFPDNGTAADTSIPANYITDVKFGASRAGGAQTSSRGWVDGYQSYIPRFESTLSNYRTTRKYNGEFILLVHDLWGADGSSIPYFPGDNGNWTETDAFLTQLVKDIKANNMLDGLILDLWNEPDIDIFWARTWPQYLDYYVHAHNFFKKNLPSTIRSGPSMASSPSTNSENWQTWLSTIASKDATPDIYSWHQIGNSSRQPDATIPDFNTLRSSKNLPERPIDINEYAAKEEQTPGCSVYYIAQLERHNLRGLRANWGSGTGLHDSLANLVFNQSGAGYLPNGEWQLYKYYAGMTGERLATKAADDSLFDVFATKSADGLVKVIAGTRIVNGQYDIQLSGLKGASVSVATYRFDWAGPMGEIMAPVALGTSTVNISSGMITISVDPATNATAYAYEISDVKE
